United States Patent Application Publication US 2010/0251416 A1 - sequence listing, part 4

SEQ ID NO: 9908 - protein, 512 aa, Saccharomyces pastorianus
MLAHNNVRQFRIDINEPHSVWKPDECITGETVIDIKRDITNVAIKLSLVCEVRVKTGNSPTSKNKRVEKILEKSTFLYGQEYIKAAPAEKKPAIDKSTVLNGLSKGEHRFPFRIKIPRGKGMLSSIKFERGSIAYFLNCTLESLNNVNALKKPEARCEREFSVIVPLDVSRLPKQKTKTVVLQSASMVQNKKGKSSEDASSSYTQLTHKSNNSNSSSSTVNSSKTSSPPNKTVTISVDIPHAGFVIGETIPIDVKIEHYKPFYHPAGLTTTLVRICRVGGAGKDDPMETFRKDICQSISPIYINPETLQFQPRIHLKVPLDAFSTLTSVSKFFSFQYYIEVMVNLSKKNVVYTESNRVVGTPVEEQNGSGVEHNINRIQRKMLRMVNPETLENVSEGYESSIFFKDMVNVEKLKRLRNVTGMSIETVIGTTRSEQQQYDTNLPRQPATTTAQDPVPDLRDWLAPLNAYECDDVPVPKYSPNDRVNVASEDKQELEQKRLQQLESDPPSCDDY

SEQ ID NO: 9909 - DNA, 2592 bp, Gibberella zeae PH-1
  CDS (1)..(2592)
atgcctttggcaacacgtctgggaatgggtcgccgctcgagatcttctcccacgctctctaacgttacagaagctcctggtcctaccaactcgacggctcccgacactcctaataacatcgcgacatcctctccggccgagtctgccggctcctccacctctcacgccccaacggcgacgtcacccacggcatctgccacctcttctacgcgcccaggtttcctttcgcgcttcagcctcccactctctctacctttgcgcaatcgaaaccgcaacgtcaccgactttcatattcgtgccgaagaaccccaccgtcgatatagcgctggcgacaatgttcgtggagctgtcgtcatcgtcatcgtgaaaccggttcgaattactcatcttaccgtatcactgcatgggtatgtgcgtgtgcttaaagatccaacctcggtcgccaaggcgcaaggaactgttgtgttaccgcaaaacggcgatgcggcacggccaagatatcacggaaacggtcttgcaagtcttttccaagacgaacaagtgttgagtggcgagggacggctggagccaggcagatatgagttcgggttcgaccttttgtttcccgacaagggattgccaagcagtattgatttcgagcgaggaacggtttcctacatggttacagcgacgctaacgcgaccaacctcaattgccccaacgtcatcatgcgaaaggaaagtaatactggtagaaaacgtggatgttgggttactacacactcccagaccgcgcaccatctttctcgaaccaatctcgaagcgaaaccgaaggagaaagtctatggtgatagacaagtcacctgccgcccactccgaggtcaacgaagtcaacgctgggcatgaattgacagaaacaccgacagaagactaccgtgaacacaccacagatccgaggagtccgatacaaagtgatttgcgaagcgaagtcagcggggacagtggtgtcagcaacagcacaagcttgagcagaccggaagtcgcactatcccaagtagggacactcacatcagccaagcaacaagcggtagacaagaagacgatcacggcgacggttgagctgctcaaaggtggttgcttaccaggcgatgccatctctgtgcgagtcacagttcagcacaccaagcgggtcaagagcatgacgggagtgattgtgacgctactcagacaaggcaaaatcgacagcaatccgccaaaagcttttttcgacgaatctatgagccaggaagacatagctcgtattgataaggaagaggtgttcccacgatcaagaacaggtctcggtggattgtccttgtcatcttcgagttcgacaagcatattccgcaaggacctcgatcagaacatagcacctctcattattgatcccaacactatgcaaacatcagtcactgtcactgttaagctgcccgatgattcattcccaacaatcaagggtgttcctggggagatgatcagcttcaagtacgtggttgaggtggttgtcgacctgggtggaagattgtcgaatcagatgcaaacagggccagcgagattcggaccctatggtcatggaagcacagacaacaatacgtacggtccaaggaggggagcaaatatcgcagacacttcgcagatgcgccacgaaaagggggtaatcgcggtatcaatggagacagtcgtgggtacctcggattcgtcacgcggtaggaaaaagtcgagggcgtcgccgacatcacgaagcgtgcagattctcgaaagcgacgaagaggatatgatgggacaagagccaaactacggcgaagggccttccctcgaatactattcagggaacggaccactttctcctactggttatttctctccccacaccaatggtagtcgacttccttcgattccctcacatccaccacagccttactcacaagtacctcccttgcaagcttcgtcgcattcgcgtggcttctctgggtcaagtaccaacgggtttggttcttcctcagcagcgccttcgtatattccccctcccgagataccgaatccgaataatctatcagaaaaagaaagaattcggcaggccgagatacggctactaccaagccaacctccagtggcaggtccatcaacaagttcaaaccaggatgatgaagatatatacgacgcagaggacacgcctcgggtcccggatctggatgccggatttgatctgagtgtacctagtgcccccagtgcccccgaggcaggcccctcagcaccaacagaggacgacgtcgagttagcagcagtgccgccgtctggtgtcgtggaagataagcaggaaatcgaaagacggcggctgctggacgaagccagtgctcccccggacgtccccgaggatatgcagcgaagaagaattgacggcccttcaacggaagtggacaccggagctgaagccagtgcaccgagcgcaccgagcgcaccgagtgcacctttagttgatgattatgatgagtttcctggatacggctctggcgcaggaccttccagtggctcgagacacggtggtggagagcagttacctgcgtaccaaagataa

SEQ ID NO: 9910 - protein, 863 aa, Gibberella zeae PH-1
MPLATRLGMGRRSRSSPTLSNVTEAPGPTNSTAPDTPNNIATSSPAESAGSSTSHAPTATSPTASATSSTRPGFLSRFSLPLSLPLRNRNRNVTDFHIRAEEPHRRYSAGDNVRGAVVIVIVKPVRITHLTVSLHGYVRVLKDPTSVAKAQGTVVLPQNGDAARPRYHGNGLASLFQDEQVLSGEGRLEPGRYEFGFDLLFPDKGLPSSIDFERGTVSYMVTATLTRPTSIAPTSSCERKVILVENVDVGLLHTPRPRTIFLEPISKRNRRRKSMVIDKSPAAHSEVNEVNAGHELTETPTEDYREHTTDPRSPIQSDLRSEVSGDSGVSNSTSLSRPEVALSQVGTLTSAKQQAVDKKTITATVELLKGGCLPGDAISVRVTVQHTKRVKSMTGVIVTLLRQGKIDSNPPKAFFDESMSQEDIARIDKEEVFPRSRTGLGGLSLSSSSSTSIFRKDLDQNIAPLIIDPNTMQTSVTVTVKLPDDSFPTIKGVPGEMISFKYVVEVVVDLGGRLSNQMQTGPARFGPYGHGSTDNNTYGPRRGANIADTSQMRHEKGVIAVSMETVVGTSDSSRGRKKSRASPTSRSVQILESDEEDMMGQEPNYGEGPSLEYYSGNGPLSPTGYFSPHTNGSRLPSIPSHPPQPYSQVPPLQASSHSRGFSGSSTNGFGSSSAAPSYIPPPEIPNPNNLSEKERIRQAEIRLLPSQPPVAGPSTSSNQDDEDIYDAEDTPRVPDLDAGFDLSVPSAPSAPEAGPSAPTEDDVELAAVPPSGVVEDKQEIERRRLLDEASAPPDVPEDMQRRRIDGPSTEVDTGAEASAPSAPSAPSAPLVDDYDEFPGYGSGAGPSSGSRHGGGEQLPAYQR

SEQ ID NO: 9911 - DNA, 2252 bp, Pichia stipitis
  CDS (87)..(2198)
tcaacatcgccgctactacatgcctccagtacaccattttaaagctcccctactccctaagcacatataagcacacctaaaccatcatgaggcgtgccgtactgaaaatcatccccacgccgaagtttctctctggttctaccgagccactccactcttccaactttcgcatagacttcaactccgtggccgatttttacatccagctcgataaaccgcataagacatggctccctggcgatgaagtgcccggcaaaatcattcttatctccaagaagaatctcgccaacatcgtcatcactttgtcattaataggttatgtgaaaatcaacgctctgtcgcactccaaattgagacctataaaacacagcttgtttgaccacacgataaagatctatggagatggcctactgccagaagctctgggttctgtaagcgaagcagacttcaccaacggcttgtacaagggcgagcacgtctttcctttcatcgtcaagcttcctaacaaaagagtatttacctctatcgatttcggtaagggttccatcagctacatattgagagcctctctaggaaattcaagctcatacacaaccacaggcgcatcaactacatcaatatcaacttcttcaaactcgatccagcctacttcctccatctttgccaaaacaaagtcgttgaaaattctccagaatccctcatacacttctgaaaaacttattcacttagtaaaccccatagacgtaactactcttacacctcccaaaccgaagcgcttgatcttgaaagatccacgcactcaacattccaagaagttgtctcgaacccaatcttcaacttctacaatcaacacaatcaatacaatcaacacatattccactgtttcttccaataattcagacacctacgaagctcctaatgctactggaaccaacactaatggctctaataacccatcacccaagcccaatgtagtgttgcctggtttagataaatcttctataaagccagagacgattaaagtctgtcttgagattcctcaacgaggctatttgcgtggagaattgataccgattaaactctcgatcagccacctcaagaagatccaggacttgcatggaattataattacccttgtaagagtctgtagattggataacggcacagagtccttttttgagtcgttcagaaaggatcttcaacaactggttcttcccattttcgtagatcctgtgaccttccagtctgaaatcaataccagtgttcgagtcccagcagatgcctttccgactattctgggatgtccgttggtatctttccagtactttattgaagttttggtgaacttgtcaggaaaatcgctagtcttagacaacgatgctcctacagatcaccattcagcaaccaagattgtagatgatccaacgactttcaatttcaactacaacaactcgttgtcttcacagcatcacaaggacagatcaggatttatcaatactgacaaatataagagactgaagaagttcctacaattgactactgaggtgattataggaacacatcgtctgacttcagatacgaatacgggagcgggcgagaatgcccagatcgacttatcgagaagatcatcttctctgatatcgaatccaaacaattctccacctaatatcaataacaatagcaataggcaggcttcgtatattaatgccattccggaggctgtggaaatgaacaatttccagtcacctccatactttgagaatttgaaccagagtcaaggtcacagccaaaccagacagtttacccctttgcctacgaacttcagttcaatacccaattattcagaattgagtggatccggttcgaatgctatgggagggtcgatttctgagaaggaacgcttaagactccttgaatcgagtttgttgccttcagctccgcctatggaacaagaagacgataacaccaataataatagtaataatagccagtaccagttctttacgtaccaaaactcttccaccgcgacctcacagatggcagagaacaacgacgaacagtatgatgcaattgactttgtgcccaactacaattctgccagtaacgacagactcctcgctgaaggaagacaagccggcactggtgctgcttctactttgacgagagaatctggtagtgattctgcttcacatgcgtaatgcagcataagataggactatatagctagaaagtatagatgccatgaattcaag

SEQ ID NO: 9912 - protein, 703 aa, Pichia stipitis
MRRAVLKIIPTPKFLSGSTEPLHSSNFRIDFNSVADFYIQLDKPHKTWLPGDEVPGKIILISKKNLANIVITLSLIGYVKINALSHSKLRPIKHSLFDHTIKIYGDGLLPEALGSVSEADFTNGLYKGEHVFPFIVKLPNKRVFTSIDFGKGSISYILRASLGNSSSYTTTGASTTSISTSSNSIQPTSSIFAKTKSLKILQNPSYTSEKLIHLVNPIDVTTLTPPKPKRLILKDPRTQHSKKLSRTQSSTSTINTINTINTYSTVSSNNSDTYEAPNATGTNTNGSNNPSPKPNVVLPGLDKSSIKPETIKVCLEIPQRGYLRGELIPIKLSISHLKKIQDLHGIIITLVRVCRLDNGTESFFESFRKDLQQLVLPIFVDPVTFQSEINTSVRVPADAFPTILGCPLVSFQYFIEVLVNLSGKSLVLDNDAPTDHHSATKIVDDPTTFNFNYNNSLSSQHHKDRSGFINTDKYKRLKKFLQLTTEVIIGTHRLTSDTNTGAGENAQIDLSRRSSSLISNPNNSPPNINNNSNRQASYINAIPEAVEMNNFQSPPYFENLNQSQGHSQTRQFTPLPTNFSSIPNYSELSGSGSNAMGGSISEKERLRLLESSLLPSAPPMEQEDDNTNNNSNNSQYQFFTYQNSSTATSQMAENNDEQYDAIDFVPNYNSASNDRLLAEGRQAGTGAASTLTRESGSDSASHA

SEQ ID NO: 9913 - DNA, 1647 bp, Ashbya gossypii; identical to SEQ ID NO: 7409
  CDS (1)..(1647)

SEQ ID NO: 9914 - protein, 548 aa, Ashbya gossypii; identical to SEQ ID NO: 7410

SEQ ID NO: 9915 - DNA, 2349 bp, Debaryomyces hansenii; identical to SEQ ID NO: 7413
  CDS (1)..(2349)

SEQ ID NO: 9916 - protein, 782 aa, Debaryomyces hansenii; identical to SEQ ID NO: 7414

SEQ ID NO: 9917 - DNA, 2328 bp, Emericella nidulans
  CDS (1)..(2328)
atggttagggcgacgtgttcatgtgtcatgtccgtcaatcctctctccgcccaaacctctgcttcgccgctcagtcggaatcggtcctctcttctgtccaaattccggacgcagctcggtcagcgcaatcgcgctataactgatttctatattgagcccgatgacccttggcgttcctattttcccggcgatgttataaaagggacggtgtctctcacggtcgttcggcctgttcgcataacacatttggttatctctttgcacggcattgtcaaagtcttcaagaacaatgttccagctggtgaaactcccccggatgtggggtccttgggtcctgggcgcgggcgccgaggcgctgagtatttgggtaacggcgtcgcaacattgtttgaagatgaggtggtactttgtggggaaggtcgtctcaaggaagggatttacaagtttcgttttgagatgtcctttccaccatacccattacctagcagcatcagcttcgagaggggcaccatttcttacatgcttacgtccaccttgaccaaacctacaactatgaacccgacattatcatgccgaagacgcataaacttactggaaaacattgatattgcggcctttccggcgcccaagcctcgagtggtaactcttgaacctatttccaagcgctcgaagccgaaaggaaagaccaaggcggcaggattcgatgctcctgacacggcctcattagagccatcggcaagtggaggaatcactgtcccagagcatcgccctccgctcagtccggcacctagcaatgttagctcgtctagtcgcctcagcaacagcagccagagttttcagatcgtgacggatccagggtcgaccgctagtagcggtgttcgcaatagcgaagcccggagcaacacgccttctgtgaccgatggaataatcaccgccaaggctgaagttctgcgcgctggcgtgctacccggtgacacattgcccataaagataaccattaaccacacaaaacaagtgcgcagcgcgcatgggatcatcataactctctatcgatccggccgtatcgaccttcaccctgctatcccgatgggatctaccgcgaatggaaagaagccaatctacgaagactattatccccgttctagaactggcctggggggtcttacccttggtacttcccgtgccagcagcgtatttcggaaagatctgtcacagacctttgcgcctctcattgtggatccgacgactttgacagctgatatcaagacttcaatccgcatacctgaagatgctttcccgacaattacccgcacaccaggtagcatgatcaacttccgttattatgttgaagtggttgtcgatctgcgcggcaagctgacttctccggagcgttttcttccgcggtttaacctagtttcttcagggcgcaacttctcctcaaatgggaagattgtgcaccctgccgatacgaatggaagcgcgatcacagccaactggggtgacaacattctagacacggatcaaatacgtcgtgaaaagggagttgttgctgtgattttcgaggtggtcattgggacccaagatacacagaggcgcaagagtgaagcccggcgcatgtcatctacggcggaggaagcagagttccagcagcccgtagaaaactccgttgatggagattacgctggccacgactaccagggcagcatggcgggcccagagcccggctatgctccgctagagaacactgcatatggacctgatcaaattcgttggccagattatccagagcagtcggagcatgagcattatcctttccagccggggacgcttcccagtcctcagccggatgagcctatggacgaaaaggcacgattacggcgtgctgaacagacgctcttgcctagtcaacctccgtgcgacccggaggccgggccctcatcagcggtggaagctgcaatgcctaccgctcctgtgctccctgaagatgaccacttgaacgattatcaccaccttccgtcaacaactgtgaatggtatgactggaatggcgccagcactcatgtcagcggagtctgtgcaaacagtcattgcaggaagcagttccgcacctctcactagtccctcaagacccagtgaagaggataaacaggagttggagcgccagcggttaatgatggaagccagtgcgccaggtgacccggatgcacgtcataacgaccgcgcggatgatgggcctagtgcgcccattttccatgacgatgacgatgatcagcagctagttggaggggctgcaaatggggacgagctattaccgcggtatcaacgttga

SEQ ID NO: 9918 - protein, 775 aa, Emericella nidulans
MVRATCSCVMSVNPLSAQTSASPLSRNRSSLLSKFRTQLGQRNRAITDFYIEPDDPWRSYFPGDVIKGTVSLTVVRPVRITHLVISLHGIVKVFKNNVPAGETPPDVGSLGPGRGRRGAEYLGNGVATLFEDEVVLCGEGRLKEGIYKFRFEMSFPPYPLPSSISFERGTISYMLTSTLTKPTTMNPTLSCRRRINLLENIDIAAFPAPKPRVVTLEPISKRSKPKGKTKAAGFDAPDTASLEPSASGGITVPEHRPPLSPAPSNVSSSSRLSNSSQSFQIVTDPGSTASSGVRNSEARSNTPSVTDGIITAKAEVLRAGVLPGDTLPIKITINHTKQVRSAHGIIITLYRSGRIDLHPAIPMGSTANGKKPIYEDYYPRSRTGLGGLTLGTSRASSVFRKDLSQTFAPLIVDPTTLTADIKTSIRIPEDAFPTITRTPGSMINFRYYVEVVVDLRGKLTSPERFLPRFNLVSSGRNFSSNGKIVHPADTNGSAITANWGDNILDTDQIRREKGVVAVIFEVVIGTQDTQRRKSEARRMSSTAEEAEFQQPVENSVDGDYAGHDYQGSMAGPEPGYAPLENTAYGPDQIRWPDYPEQSEHEHYPFQPGTLPSPQPDEPMDEKARLRRAEQTLLPSQPPCDPEAGPSSAVEAAMPTAPVLPEDDHLNDYHHLPSTTVNGMTGMAPALMSAESVQTVIAGSSSAPLTSPSRPSEEDKQELERQRLMMEASAPGDPDARHNDRADDGPSAPIFHDDDDDQQLVGGAANGDELLPRYQR

SEQ ID NO: 9919 - DNA, 1719 bp, Kluyveromyces lactis; identical to SEQ ID NO: 7415
  CDS (1)..(1719)

SEQ ID NO: 9920 - protein, 572 aa, Kluyveromyces lactis; identical to SEQ ID NO: 7416

SEQ ID NO: 9921 - DNA, 2313 bp, Magnaporthe grisea
  CDS (1)..(2313)
atgggcggctcctcggcctccaggaaccaatcttcgctgcttgaagacacgcacacgagccgatcgctaatctctcgcctcttttcgcgttcaaagacgcgacacattaccgatttccacatccgccccgtcgatccgcaccgcaagtacgccaaaggcgaccatgtcaccggcgccgttgttttgactgtcctcaggccaattcgcatcacacacctaactgttgctctccacggcttcgtcaaggtcttcaagagtcccaacgcagcccacgaagccacgatcaataccgcgcagattgcctctggcgttaccaaccggacacgataccttggcaatggcctcgcgtcactcttccaagatgagcaggttcttagcgccgacggaaagctggaggcggggcgttacgagttcaattttgatctcgtgtttccatccaaggttaaccttccaacgagcatcgatgaaaatttacttggtggagaaagtagacataggatccatcccagcaccgcggccgcgaacgatatctctcgagccaatatccaggaggacacggaggaggaggacggaccgaccaaggcacctgagagtgttgctgcagaatccaacatcgcaaacgatgccgccttcgagggccagcaagccccgcaaagtcccacacgtaccgagatgcccgatgtcatgagcgaggtcagcacagagagcgccatcacgagtagcagtgcgggcgcaagcgttggatacaaggtcagtgaggcaacgggaagttcttcgggctcacaatttggtgccagaacacctacggttgaggaaaagaccatcaccgccagcgtcgaaatgctcaagggtggctgcctaccgggagactttgtccccgtcaagatctcagtgcaccacatcaagaggataaaaagcgttcatggagtcattgtcactctgtacaggcaaggaagaatagactcggcaccgcccatatcgtctttccagggcctgtccaaggaagacgtgcgtcgcctggaaaaggaagaatatttcccacggtcgaaaacagggctgagcggcttgtctttgtcatcagctggttcctgcagcgtcttccgcaaggatctctcgcaggcctttggtcctctgatcatcgaccccatcacactggacgcaagcgtgacgatttcggttcgagtaccagaggatgtctttcctaccatcaagggcgtgcccggggagctgattagcttcaagtatcaaatggaggtaatagtggacttgggaggcaagctggccagccaaatctcgtcggtacaatccaaagccggcggcatatctgccggtggcgcaatgccctctgccagaaacccatacgaaagcggaggctcgtctatcatgggaagctggggcaacagcatcatagatacggaccagctgcgtcgccacaagggtgtcatctcggttgtgttcgaagttcctgtagggagcgtggactcaagtcgacaaaggacaaggggcggttctcttcgtccgaatccccaagcgcgccagccgtcgcaagcgaccgaatcgtcgcaaataccgacagtaggctatggaccggaagacaaacagcgggctcagtcagagccagctgggcaagaggactatgttcacagtcatggaagtcagggcaacggacctatgggaccaagtactgaatatgtacccagcccgtactacactccacacgatcctcgtcaacagcatgcgccgatctacataccacccccagatgtgccgaacgatatgggcctgtcagaaaaggaacgagcgcgccgagcggagcagagactgctgccaagtcagcctccagcagccccatttgcaagcacgttatccgagactacccttgaggatatatacaacgtcgaggacgacgcagcagcagggccgtcgtcggctcccatcgtaggaaactctaacggggttgcaacggcaccgactctggacgaggttgaatctggcgaagcagcggttggcaacagtgaggacaagctggagagagagcgtcaccgtctgctgcaagaggcaagcgccccgcctgatttccccgaagactatgacacgggggacccaggtcctagtaatcaagggcctgtcacgagtgcgacggcgccggcattaagctttcagccctcggcacctatactctccgaggacgacgaggaccctggcagctcgtatttcaatcagcacacgagcacaggggattacatgggggctggtgccctgggtcgtccaattacggcacctcacgagccacttcctcgatatcagaggtag

SEQ ID NO: 9922 - protein, 770 aa, Magnaporthe grisea
MGGSSASRNQSSLLEDTHTSRSLISRLFSRSKTRHITDFHIRPVDPHRKYAKGDHVTGAVVLTVLRPIRITHLTVALHGFVKVFKSPNAAHEATINTAQIASGVTNRTRYLGNGLASLFQDEQVLSADGKLEAGRYEFNFDLVFPSKVNLPTSIDENLLGGESRHRIHPSTAAANDISRANIQEDTEEEDGPTKAPESVAAESNIANDAAFEGQQAPQSPTRTEMPDVMSEVSTESAITSSSAGASVGYKVSEATGSSSGSQFGARTPTVEEKTITASVEMLKGGCLPGDFVPVKISVHHIKRIKSVHGVIVTLYRQGRIDSAPPISSFQGLSKEDVRRLEKEEYFPRSKTGLSGLSLSSAGSCSVFRKDLSQAFGPLIIDPITLDASVTISVRVPEDVFPTIKGVPGELISFKYQMEVIVDLGGKLASQISSVQSKAGGISAGGAMPSARNPYESGGSSIMGSWGNSIIDTDQLRRHKGVISVVFEVPVGSVDSSRQRTRGGSLRPNPQARQPSQATESSQIPTVGYGPEDKQRAQSEPAGQEDYVHSHGSQGNGPMGPSTEYVPSPYYTPHDPRQQHAPIYIPPPDVPNDMGLSEKERARRAEQRLLPSQPPAAPFASTLSETTLEDIYNVEDDAAAGPSSAPIVGNSNGVATAPTLDEVESGEAAVGNSEDKLERERHRLLQEASAPPDFPEDYDTGDPGPSNQGPVTSATAPALSFQPSAPILSEDDEDPGSSYFNQHTSTGDYMGAGALGRPITAPHEPLPRYQR

SEQ ID NO: 9923 - DNA, 1629 bp, Saccharomyces cerevisiae; identical to SEQ ID NO: 7407
  CDS (1)..(1629)

SEQ ID NO: 9924 - protein, 542 aa, Saccharomyces cerevisiae; identical to SEQ ID NO: 7408

SEQ ID NO: 9925 - DNA, 25 bp, Artificial sequence
  primer
atggatcctatggagactttcagaa

SEQ ID NO: 9926 - DNA, 24 bp, Artificial sequence
  primer
ttaatagtcatcacaagggggagg

SEQ ID NO: 9927 - protein, 675 aa, Artificial sequence
  consensus sequence
  Variant (2)..(2): Xaa in position 2 is any amino acid
  Variant (4)..(8): Xaa in position 4 to 8 is any amino acid
  Variant (10)..(19): Xaa in position 10 to 19 is any amino acid
  Variant (21)..(38): Xaa in position 21 to 38 is any amino acid
  Variant (40)..(68): Xaa in position 40 to 68 is any amino acid
  Variant (69)..(74): Xaa in position 69 to 74 is any or no amino acid
  Variant (76)..(82): Xaa in position 76 to 82 is any amino acid
  Variant (83)..(100): Xaa in position 83 to 100 is any or no amino acid
  Variant (102)..(103): Xaa in position 102 to 103 is any amino acid
  Variant (105)..(107): Xaa in position 105 to 107 is any amino acid
  Variant (109)..(109): Xaa in position 109 is any amino acid
  Variant (111)..(114): Xaa in position 111 to 114 is any amino acid
  Variant (116)..(121): Xaa in position 116 to 121 is any amino acid
  Variant (122)..(122): Xaa in position 122 is any or no amino acid
  Variant (125)..(125): Xaa in position 125 is any amino acid
  Variant (127)..(127): Xaa in position 127 is any amino acid
  Variant (128)..(128): Xaa in position 128 is any or no amino acid
  Variant (130)..(132): Xaa in position 130 to 132 is any amino acid
  Variant (134)..(230): Xaa in position 134 to 230 is any amino acid
  Variant (231)..(297): Xaa in position 231 to 297 is any or no amino acid
  Variant (299)..(301): Xaa in position 299 to 301 is any amino acid
  Variant (303)..(312): Xaa in position 303 to 312 is any amino acid
  Variant (314)..(314): Xaa in position 314 is any amino acid
  Variant (316)..(321): Xaa in position 316 to 321 is any amino acid
  Variant (323)..(325): Xaa in position 323 to 325 is any amino acid
  Variant (328)..(328): Xaa in position 328 is any amino acid
  Variant (330)..(331): Xaa in position 330 to 331 is any amino acid
  Variant (333)..(338): Xaa in position 333 to 338 is any amino acid
  Variant (339)..(380): Xaa in position 339 to 380 is any or no amino acid
  Variant (385)..(386): Xaa in position 385 to 386 is any amino acid
  Variant (388)..(390): Xaa in position 388 to 390 is any amino acid
  Variant (392)..(395): Xaa in position 392 to 395 is any amino acid
  Variant (397)..(397): Xaa in position 397 is any amino acid
  Variant (399)..(408): Xaa in position 399 to 408 is any amino acid
  Variant (411)..(411): Xaa in position 411 is any amino acid
  Variant (413)..(413): Xaa in position 413 is any amino acid
  Variant (415)..(415): Xaa in position 415 is any amino acid
  Variant (417)..(424): Xaa in position 417 to 424 is any amino acid
  Variant (425)..(426): Xaa in position 425 to 426 is any or no amino acid
  Variant (428)..(428): Xaa in position 428 is any amino acid
  Variant (430)..(431): Xaa in position 430 to 431 is any amino acid
  Variant (434)..(436): Xaa in position 434 to 436 is any amino acid
  Variant (438)..(439): Xaa in position 438 to 439 is any amino acid
  Variant (441)..(480): Xaa in position 441 to 480 is any amino acid
  Variant (481)..(507): Xaa in position 481 to 507 is any or no amino acid
  Variant (509)..(511): Xaa in position 509 to 511 is any amino acid
  Variant (513)..(517): Xaa in position 513 to 517 is any amino acid
  Variant (519)..(520): Xaa in position 519 to 520 is any amino acid
  Variant (524)..(566): Xaa in position 524 to 566 is any amino acid
  Variant (567)..(619): Xaa in position 567 to 619 is any or no amino acid
  Variant (621)..(635): Xaa in position 621 to 635 is any amino acid
  Variant (636)..(658): Xaa in position 636 to 658 is any or no amino acid
  Variant (660)..(669): Xaa in position 660 to 669 is any amino acid
  Variant (671)..(671): Xaa in position 671 is any amino acid
  Variant (673)..(673): Xaa in position 673 is any amino acid
FXIXXXXXHXXXXXXXXXXGXXXXXXXXXXXXXXXXXXLXXXXXXXXXXXXXXXXXXXXXXXXXXXXXXXXXXXGXXXXXXXXXXXXXXXXXXXXXXXXXLXXGXXXFXFXXXXPXXXXXXXSIXFXXGXXXYXXXXXXXXXXXXXXXXXXXXXXXXXXXXXXXXXXXXXXXXXXXXXXXXXXXXXXXXXXXXXXXXXXXXXXXXXXXXXXXXXXXXXXXXXXXXXXXXXXXXXXXXXXXXXXXXXXXXXXXXXXXXXXXXXXXXXXXXXXXXXXXXXXXXXXXXXXXXXXXXXXXXGXXXGXXXXXXXXXXHXKXXXXXXGXXXTLXRXXRXXXXXXXXXXXXXXXXXXXXXXXXXXXXXXXXXXXXXXXXXXXXXXXXFRKDXXQXXXPXXXXPXTXXXXXXXXXXVPXDXFXTXXXXXXXXXXFXYXXEVXXXLXXKXXXXXXXXXXXXXXXXXXXXXXXXXXXXXXXXXXXXXXXXXXXXXXXXXXXXXXXXXXXXXXXXXXXRXXXVXXXXXEXXIGTXXXXXXXXXXXXXXXXXXXXXXXXXXXXXXXXXXXXXXXXXXXXXXXXXXXXXXXXXXXXXXXXXXXXXXXXXXXXXXXXXXXXXXXXXXXXXXXXPXXXXXXXXXXXXXXXXXXXXXXXXXXXXXXXXXXXXXXKXXXXXXXXXXLXSXPP

SEQ ID NO: 9928 - protein, 37 aa, Artificial sequence
  protein pattern
  Variant (5)..(5): Xaa in position 5 is Ile or Leu
  Variant (6)..(6): Xaa in position 6 is any amino acid
  Variant (8)..(8): Xaa in position 8 is any amino acid
  Variant (9)..(9): Xaa in position 9 is Phe, Ile or Val
  Variant (10)..(10): Xaa in position 10 is any amino acid
  Variant (12)..(12): Xaa in position 12 is Ile or Leu
  Variant (13)..(13): Xaa in position 13 is any amino acid
  Variant (14)..(14): Xaa in position 14 is Ile or Val
  Variant (15)..(15): Xaa in position 15 is Asp or Asn
  Variant (17)..(17): Xaa in position 17 is any amino acid
  Variant (19)..(19): Xaa in position 19 is Phe, Leu or Met
  Variant (20)..(20): Xaa in position 20 is Asp, Gln or Thr
  Variant (21)..(21): Xaa in position 21 is any amino acid
  Variant (22)..(22): Xaa in position 22 is Asp, Glu, Gln or Ser
  Variant (23)..(26): Xaa in position 23 to 26 is any amino acid
  Variant (27)..(27): Xaa in position 27 is Ile, Leu or Val
  Variant (28)..(28): Xaa in position 28 is Lys or Arg
  Variant (29)..(29): Xaa in position 29 is Ile, Leu or Val
  Variant (31)..(31): Xaa in position 31 is any amino acid
  Variant (33)..(33): Xaa in position 33 is Ala, Ser or Val
  Variant (35)..(35): Xaa in position 35 is Pro or Ser
  Variant (37)..(37): Xaa in position 37 is Ile or Leu
FRKDXXQXXXPXXXXPXTXXXXXXXXXXXPXDXFXTX

SEQ ID NO: 9929 - protein, 18 aa, Artificial sequence
  protein pattern
  Variant (2)..(4): Xaa in position 2 to 4 is any or no amino acid
  Variant (6)..(6): Xaa in position 6 is any amino acid
  Variant (8)..(8): Xaa in position 8 is any amino acid
  Variant (9)..(9): Xaa in position 9 is Ile, Met or Val
  Variant (12)..(12): Xaa in position 12 is Ile, Leu, Met or Val
  Variant (13)..(13): Xaa in position 13 is Ile or Val
  Variant (14)..(14): Xaa in position 14 is Asp or Asn
  Variant (16)..(17): Xaa in position 16 to 17 is any amino acid
  Variant (18)..(18): Xaa in position 18 is Lys or Arg
SXXXFXYXXEVXXXLXXX

SEQ ID NO: 9930 - protein, 19 aa, Artificial sequence
  protein pattern
  Variant (3)..(3): Xaa in position 3 is any amino acid
  Variant (5)..(5): Xaa in position 5 is any amino acid
  Variant (7)..(7): Xaa in position 7 is Gln or Arg
  Variant (8)..(8): Xaa in position 8 is any amino acid
  Variant (9)..(9): Xaa in position 9 is Lys or Arg
  Variant (11)..(12): Xaa in position 11 to 12 is any amino acid
  Variant (13)..(13): Xaa in position 13 is any or no amino acid
  Variant (15)..(15): Xaa in position 15 is any or no amino acid
  Variant (17)..(17): Xaa in position 17 is Ala, Asp or Glu
  Variant (19)..(19): Xaa in position 19 is Gly, Pro or Ser
DKXEXEXXXLXXXEXSXPX

SEQ ID NO: 9931 - DNA, 2430 bp, Saccharomyces cerevisiae
  CDS (1)..(2430)
atgtcttctgtagaagaattgactcagctgttttcacaggttgggtttgaagataaaaaggtgaaggagattgtcaagaataaaaaggtttctgattcactttacaaattgattaaggagactccttcggactatcaatggaacaaatctactagagcgctagtacacaacctggcatcttttgtcaaaggtacagatctacccaagtctgaattaattgttaacggcatcattaatggtgatttgaagacatctctgcaagtcgatgccgcatttaaatatgtaaaggctaatggcgaggcatccaccaaaatgggtatgaatgaaaactctggtgttggtattgagattacagaggatcaggttagaaattacgtcatgcagtacattcaagaaaacaaggaaagaattttaactgaacgctataaactggtgccaggtatttttgccgatgttaaaaacttaaaggagctgaagtgggccgatccacgtagtttcaagccaattatcgaccaagaagtcttaaaacttttgggtccaaaggatgagagagacttaatcaagaagaagaccaagaataatgaaaagaagaaaaccaattctgccaagaagagttctgataattctgcatcatccggtccaaagaggactatgttcaatgaaggtttcctaggtgatttgcataaagtgggtgaaaacccacaagcttacccagaattaatgaaggaacaccttgaggttactggtggcaaagttcgtacaaggttccctccggagcccaatggatatttgcatattggtcattctaaagctattatggttaattttggttatgctaaatatcacaatggtacctgttatttaagatttgacgataccaaccccgaaaaggaagctcctgaatattttgaatccattaagagaatggtttcttggttaggttttaaaccatggaaaattacttactcaagtgattattttgacgagctttatcgcctcgctgaagtgttgatcaaaaacggcaaagcttacgtttgtcattgtaccgccgaagaaattaaaagaggtcgtggtattaaagaagacggtactccaggtggggagagatatgcttgtaagcatcgtgatcagtcgatagaacaaaacctgcaagaattcagagatatgagagatggcaagtacaaacctggtgaagctatcttaagaatgaaacaggatctaaattcaccaagcccacaaatgtgggacttgattgcgtatagagttttaaatgctccacatccaagaacgggaacaaaatggagaatttatcctacttacgattttacacattgtttggtcgattcaatggaaaatattacacattctttatgtactactgaattctacctatctagagaaagctatgaatggttatgtgatcaggttcatgtgttcagacccgctcaaagagaatatggtcgtttgaatatcaccggtacagttttatccaaaagaaaaattgcgcaattggtggatgaaaaattcgttagaggctgggacgatcctagactattcacgcttgaagctatacgcagacgtggtgttcctcctggtgccattttatcctttatcaacacattaggtgttaccacaagtaccacaaacattcaagttgtgaggtttgagagcgctgttagaaagtacctagaagataccacaccgagattaatgtttgtgttggatcctgttgaagttgttgtcgataatttatctgacgattatgaagaattggcaactattccttacagacctggtactccagaatttggtgaaagaactgtaccatttacaaacaaattctacattgaaaggtcagatttctcagaaaacgttgatgataaggaatttttcagattaacaccaaaccaaccagttggtttaattaaagtctcacacacagtttctttcaaaagtttggaaaaagatgaagctggtaaaattataagaattcatgtcaactatgataacaaggttgaagaaggttcgaaaccaaagaaaccaaaaacttatattcaatgggttcctatctcttcaaaatataattctccattgagagttactgaaactagggtttacaaccaattgttcaaatctgaaaatccatcttctcatcctgaaggcttcttgaaggacatcaacccagaaagtgaagtcgtttataaagaatctgtcatggaacataacttcggggacgttgtcaagaacagtccatgggtcgttgattctgttaaaaactcggaattttatgttgaagaagataaggattccaaagaagtgtgtagattccaagctatgagagtaggttatttcactctggataaagagagtacgacttctaaggttattttgaatagaatagttagcttgaaggacgcaacttccaagtga

SEQ ID NO: 9932 - protein, 809 aa, Saccharomyces cerevisiae; identical to SEQ ID NO: 7611

SEQ ID NO: 9933 - DNA, 2577 bp, Cryptococcus neoformans var. neoformans JEC21; identical to SEQ ID NO: 7612
  CDS (1)..(2577)

SEQ ID NO: 9934 - protein, 858 aa, Cryptococcus neoformans var. neoformans JEC21; identical to SEQ ID NO: 7613

SEQ ID NO: 9935 - DNA, 2361 bp, Arabidopsis thaliana; identical to SEQ ID NO: 7614
  CDS (1)..(2361)

SEQ ID NO: 9936 - protein, 786 aa, Arabidopsis thaliana; identical to SEQ ID NO: 7615

SEQ ID NO: 9937 - DNA, 2388 bp, Arabidopsis thaliana; identical to SEQ ID NO: 7616
  CDS (1)..(2388)

SEQ ID NO: 9938 - protein, 795 aa, Arabidopsis thaliana; identical to SEQ ID NO: 7617

SEQ ID NO: 9939 - DNA, 2328 bp, Mus musculus; identical to SEQ ID NO: 7618
  CDS (1)..(2328)

SEQ ID NO: 9940 - protein, 775 aa, Mus musculus; identical to SEQ ID NO: 7619

SEQ ID NO: 9941 - DNA, 2397 bp, Eremothecium gossypii; identical to SEQ ID NO: 7620
  CDS (1)..(2397)

SEQ ID NO: 9942 - protein, 798 aa, Eremothecium gossypii; identical to SEQ ID NO: 7621

SEQ ID NO: 9943 - DNA, 2325 bp, Anopheles gambiae str. PEST; identical to SEQ ID NO: 7622
  CDS (1)..(2325)

SEQ ID NO: 9944 - protein, 774 aa, Anopheles gambiae str. PEST; identical to SEQ ID NO: 7623

SEQ ID NO: 9945 - DNA, 2388 bp, Candida glabrata CBS 138; identical to SEQ ID NO: 7624
  CDS (1)..(2388)

SEQ ID NO: 9946 - protein, 795 aa, Candida glabrata CBS 138; identical to SEQ ID NO: 7625

SEQ ID NO: 9947 - DNA, 2415 bp, Kluyveromyces lactis NRRL Y-1140; identical to SEQ ID NO: 7626
  CDS (1)..(2415)

SEQ ID NO: 9948 - protein, 804 aa, Kluyveromyces lactis NRRL Y-1140; identical to SEQ ID NO: 7627

SEQ ID NO: 9949 - DNA, 2385 bp, Debaryomyces hansenii CBS767; identical to SEQ ID NO: 7628
  CDS (1)..(2385)

SEQ ID NO: 9950 - protein, 794 aa, Debaryomyces hansenii CBS767; identical to SEQ ID NO: 7629

SEQ ID NO: 9951 - DNA, 2382 bp, Yarrowia lipolytica CLIB122; identical to SEQ ID NO: 7630
  CDS (1)..(2382)

SEQ ID NO: 9952 - protein, 793 aa, Yarrowia lipolytica CLIB122; identical to SEQ ID NO: 7631

SEQ ID NO: 9953 - DNA, 2391 bp, Oryza sativa (japonica cultivar-group); identical to SEQ ID NO: 7632
  CDS (1)..(2391)

SEQ ID NO: 9954 - protein, 796 aa, Oryza sativa (japonica cultivar-group); identical to SEQ ID NO: 7633

SEQ ID NO: 9955 - DNA, 2400 bp, Candida albicans SC5314; identical to SEQ ID NO: 7634
  CDS (1)..(2400): transl_table=12

SEQ ID NO: 9956 - protein, 799 aa, Candida albicans SC5314; identical to SEQ ID NO: 7635

SEQ ID NO: 9957 - DNA, 2574 bp, Ustilago maydis 521; identical to SEQ ID NO: 7636
  CDS (1)..(2574)

SEQ ID NO: 9958 - protein, 857 aa, Ustilago maydis 521; identical to SEQ ID NO: 7637

SEQ ID NO: 9959 - DNA, 2343 bp, Gallus gallus; identical to SEQ ID NO: 7638
  CDS (1)..(2343)

SEQ ID NO: 9960 - protein, 780 aa, Gallus gallus; identical to SEQ ID NO: 7639

SEQ ID NO: 9961 - DNA, 2391 bp, Oryza sativa; identical to SEQ ID NO: 7640
  CDS (1)..(2391)

SEQ ID NO: 9962 - protein, 796 aa, Oryza sativa; identical to SEQ ID NO: 7641

SEQ ID NO: 9963 - DNA, 2325 bp, Brachydanio rerio; identical to SEQ ID NO: 7642
  CDS (1)..(2325)

SEQ ID NO: 9964 - protein, 774 aa, Brachydanio rerio; identical to SEQ ID NO: 7643

SEQ ID NO: 9965 - DNA, 2319 bp, Xenopus laevis; identical to SEQ ID NO: 7644
  CDS (1)..(2319)

SEQ ID NO: 9966 - protein, 772 aa, Xenopus laevis; identical to SEQ ID NO: 7645

SEQ ID NO: 9967 - DNA, 2361 bp, Caenorhabditis elegans; identical to SEQ ID NO: 7646
  CDS (1)..(2361)

SEQ ID NO: 9968 - protein, 786 aa, Caenorhabditis elegans; identical to SEQ ID NO: 7647

SEQ ID NO: 9969 - DNA, 2385 bp, Lupinus luteus; identical to SEQ ID NO: 7648
  CDS (1)..(2385)

SEQ ID NO: 9970 - protein, 794 aa, Lupinus luteus; identical to SEQ ID NO: 7649

SEQ ID NO: 9971 - DNA, 2436 bp, Schizosaccharomyces pombe; identical to SEQ ID NO: 7650
  CDS (1)..(2436)

SEQ ID NO: 9972 - protein, 811 aa, Schizosaccharomyces pombe; identical to SEQ ID NO: 7651

SEQ ID NO: 9973 - DNA, 2175 bp, Brassica napus; identical to SEQ ID NO: 7652
  CDS (1)..(2175)

SEQ ID NO: 9974 - protein, 724 aa, Brassica napus; identical to SEQ ID NO: 7653

SEQ ID NO: 9975 - DNA, 2202 bp, Glycine max; identical to SEQ ID NO: 7654
  CDS (1)..(2202)

SEQ ID NO: 9976 - protein, 733 aa, Glycine max; identical to SEQ ID NO: 7655

SEQ ID NO: 9977 - DNA, 2385 bp, Glycine max; identical to SEQ ID NO: 7656
  CDS (1)..(2385)

SEQ ID NO: 9978 - protein, 794 aa, Glycine max; identical to SEQ ID NO: 7657

SEQ ID NO: 9979 - DNA, 2199 bp, Glycine max; identical to SEQ ID NO: 7658
  CDS (1)..(2199)

SEQ ID NO: 9980 - protein, 732 aa, Glycine max; identical to SEQ ID NO: 7659

SEQ ID NO: 9981 - DNA, 2388 bp, Hordeum vulgare; identical to SEQ ID NO: 7660
  CDS (1)..(2388)

SEQ ID NO: 9982 - protein, 795 aa, Hordeum vulgare; identical to SEQ ID NO: 7661

SEQ ID NO: 9983 - DNA, 2163 bp, Hordeum vulgare; identical to SEQ ID NO: 7662
  CDS (1)..(2163)

SEQ ID NO: 9984 - protein, 720 aa, Hordeum vulgare; identical to SEQ ID NO: 7663

SEQ ID NO: 9985 - DNA, 2388 bp, Triticum aestivum; identical to SEQ ID NO: 7664
  CDS (1)..(2388)

SEQ ID NO: 9986 - protein, 795 aa, Triticum aestivum; identical to SEQ ID NO: 7665

SEQ ID NO: 9987 - DNA, 2388 bp, Glycine max; identical to SEQ ID NO: 7666
  CDS (1)..(2388)

SEQ ID NO: 9988 - protein, 795 aa, Glycine max; identical to SEQ ID NO: 7667

SEQ ID NO: 9989 - DNA, 2148 bp, Zea mays; identical to SEQ ID NO: 7668
  CDS (1)..(2148)

SEQ ID NO: 9990 - protein, 715 aa, Zea mays; identical to SEQ ID NO: 7669

SEQ ID NO: 9991 - DNA, 2391 bp, Zea mays; identical to SEQ ID NO: 7670
  CDS (1)..(2391)

SEQ ID NO: 9992 - protein, 796 aa, Zea mays; identical to SEQ ID NO: 7671

SEQ ID NO: 9993 - DNA, 2148 bp, Zea mays; identical to SEQ ID NO: 7672
  CDS (1)..(2148)

SEQ ID NO: 9994 - protein, 715 aa, Zea mays; identical to SEQ ID NO: 7673

SEQ ID NO: 9995 - DNA, 25 bp, Artificial sequence
  primer
atgtcttctgtagaagaattgactc

SEQ ID NO: 9996 - DNA, 24 bp, Artificial sequence
  primer
tcacttggaagttgcgtccttcaa

SEQ ID NO: 9997 - protein, 834 aa, Artificial sequence; identical to SEQ ID NO: 7676
  consensus sequence
  Variant (2)..(21): Xaa in position 2 to 21 is any amino acid
  Variant (22)..(27): Xaa in position 22 to 27 is any or no amino acid
  Variant (29)..(37): Xaa in position 29 to 37 is any amino acid
  Variant (39)..(54): Xaa in position 39 to 54 is any amino acid
  Variant (55)..(59): Xaa in position 55 to 59 is any or no amino acid
  Variant (61)..(64): Xaa in position 61 to 64 is any amino acid
  Variant (66)..(66): Xaa in position 66 is any amino acid
  Variant (68)..(111): Xaa in position 68 to 111 is any amino acid
  Variant (112)..(114): Xaa in position 112 to 114 is any or no amino acid
  Variant (116)..(133): Xaa in position 116 to 133 is any amino acid
  Variant (134)..(134): Xaa in position 134 is any or no amino acid
  Variant (136)..(136): Xaa in position 136 is any amino acid
  Variant (138)..(167): Xaa in position 138 to 167 is any amino acid
  Variant (168)..(221): Xaa in position 168 to 221 is any or no amino acid
  Variant (223)..(225): Xaa in position 223 to 225 is any amino acid
  Variant (226)..(227): Xaa in position 226 to 227 is any or no amino acid
  Variant (229)..(229): Xaa in position 229 is any amino acid
  Variant (231)..(231): Xaa in position 231 is any amino acid
  Variant (241)..(241): Xaa in position 241 is any amino acid
  Variant (247)..(247): Xaa in position 247 is any amino acid
  Variant (250)..(253): Xaa in position 250 to 253 is any amino acid
  Variant (255)..(256): Xaa in position 255 to 256 is any amino acid
  Variant (258)..(261): Xaa in position 258 to 261 is any amino acid
  Variant (263)..(266): Xaa in position 263 to 266 is any amino acid
  Variant (268)..(268): Xaa in position 268 is any amino acid
  Variant (275)..(275): Xaa in position 275 is any amino acid
  Variant (277)..(283): Xaa in position 277 to 283 is any amino acid
  Variant (285)..(289): Xaa in position 285 to 289 is any amino acid
  Variant (291)..(291): Xaa in position 291 is any amino acid
  Variant (293)..(294): Xaa in position 293 to 294 is any amino acid
  Variant (296)..(297): Xaa in position 296 to 297 is any amino acid
  Variant (298)..(298): Xaa in position 298 is any or no amino acid
  Variant (301)..(301): Xaa in position 301 is any amino acid
  Variant (306)..(306): Xaa in position 306 is any amino acid
  Variant (307)..(307): Xaa in position 307 is any or no amino acid
  Variant (310)..(311): Xaa in position 310 to 311 is any amino acid
  Variant (313)..(314): Xaa in position 313 to 314 is any amino acid
  Variant (317)..(318): Xaa in position 317 to 318 is any amino acid
  Variant (320)..(320): Xaa in position 320 is any amino acid
  Variant (324)..(334): Xaa in position 324 to 334 is any amino acid
  Variant (336)..(341): Xaa in position 336 to 341 is any amino acid
  Variant (342)..(352): Xaa in position 342 to 352 is any or no amino acid
  Variant (354)..(357): Xaa in position 354 to 357 is any amino acid
  Variant (360)..(360): Xaa in position 360 is any amino acid
  Variant (362)..(363): Xaa in position 362 to 363 is any amino acid
  Variant (365)..(366): Xaa in position 365 to 366 is any amino acid
  Variant (368)..(369): Xaa in position 368 to 369 is any amino acid
  Variant (371)..(379): Xaa in position 371 to 379 is any amino acid
  Variant (381)..(381): Xaa in position 381 is any amino acid
  Variant (383)..(390): Xaa in position 383 to 390 is any amino acid
  Variant (391)..(393): Xaa in position 391 to 393 is any or no amino acid
  Variant (395)..(396): Xaa in position 395 to 396 is any amino acid
  Variant (400)..(403): Xaa in position 400 to 403 is any amino acid
  Variant (406)..(408): Xaa in position 406 to 408 is any amino acid
  Variant (410)..(410): Xaa in position 410 is any amino acid
  Variant (413)..(413): Xaa in position 413 is any amino acid
  Variant (417)..(417): Xaa in position 417 is any amino acid
  Variant (420)..(421): Xaa in position 420 to 421 is any amino acid
  Variant (424)..(425): Xaa in position 424 to 425 is any amino acid
  Variant (428)..(428): Xaa in position 428 is any amino acid
  Variant (430)..(430): Xaa in position 430 is any amino acid
  Variant (438)..(438): Xaa in position 438 is any amino acid
  Variant (441)..(443): Xaa in position 441 to 443 is any amino acid
  Variant (445)..(445): Xaa in position 445 is any amino acid
  Variant (448)..(448): Xaa in position 448 is any amino acid
  Variant (451)..(462): Xaa in position 451 to 462 is any amino acid
  Variant (464)..(465): Xaa in position 464 to 465 is any amino acid
  Variant (469)..(471): Xaa in position 469 to 471 is any amino acid
  Variant (473)..(474): Xaa in position 473 to 474 is any amino acid
  Variant (479)..(482): Xaa in position 479 to 482 is any amino acid
  Variant (484)..(487): Xaa in position 484 to 487 is any amino acid
  Variant (489)..(490): Xaa in position 489 to 490 is any amino acid
  Variant (496)..(497): Xaa in position 496 to 497 is any amino acid
  Variant (499)..(503): Xaa in position 499 to 503 is any amino acid
  Variant (507)..(510): Xaa in position 507 to 510 is any amino acid
  Variant (512)..(514): Xaa in position 512 to 514 is any amino acid
  Variant (516)..(519): Xaa in position 516 to 519 is any amino acid
  Variant (521)..(521): Xaa in position 521 is any amino acid
  Variant (523)..(537): Xaa in position 523 to 537 is any amino acid
  Variant (538)..(538): Xaa in position 538 is any or no amino acid
  Variant (540)..(541): Xaa in position 540 to 541 is any amino acid
  Variant (543)..(547): Xaa in position 543 to 547 is any amino acid
  Variant (549)..(549): Xaa in position 549 is any amino acid
  Variant (551)..(551): Xaa in position 551 is any amino acid
  Variant (554)..(557): Xaa in position 554 to 557 is any amino acid
  Variant (559)..(574): Xaa in position 559 to 574 is any amino acid
  Variant (575)..(577): Xaa in position 575 to 577 is any or no amino acid
  Variant (579)..(587): Xaa in position 579 to 587 is any amino acid
  Variant (588)..(592): Xaa in position 588 to 592 is any or no amino acid
  Variant (594)..(598): Xaa in position 594 to 598 is any amino acid
  Variant (600)..(602): Xaa in position 600 to 602 is any amino acid
  Variant (604)..(614): Xaa in position 604 to 614 is any amino acid
  Variant (615)..(615): Xaa in position 615 is any or no amino acid
  Variant (617)..(620): Xaa in position 617 to 620 is any amino acid
  Variant (621)..(623): Xaa in position 621 to 623 is any or no amino acid
  Variant (625)..(651): Xaa in position 625 to 651 is any amino acid
  Variant (652)..(662): Xaa in position 652 to 662 is any or no amino acid
  Variant (664)..(664): Xaa in position 664 is any amino acid
  Variant (666)..(669): Xaa in position 666 to 669 is any amino acid
  Variant (671)..(677): Xaa in position 671 to 677 is any amino acid
  Variant (678)..(684): Xaa in position 678 to 684 is any or no amino acid
  Variant (686)..(686): Xaa in position 686 is any amino acid
  Variant (688)..(691): Xaa in position 688 to 691 is any amino acid
  Variant (694)..(697): Xaa in position 694 to 697 is any amino acid
  Variant (699)..(702): Xaa in position 699 to 702 is any amino acid
  Variant (703)..(708): Xaa in position 703 to 708 is any or no amino acid
  Variant (710)..(712): Xaa in position 710 to 712 is any amino acid
  Variant (715)..(721): Xaa in position 715 to 721 is any amino acid
  Variant (722)..(722): Xaa in position 722 is any or no amino acid
  Variant (724)..(738): Xaa in position 724 to 738 is any amino acid
  Variant (739)..(793): Xaa in position 739 to 793 is any or no amino acid
  Variant (795)..(796): Xaa in position 795 to 796 is any amino acid
  Variant (798)..(798): Xaa in position 798 is any amino acid
  Variant (802)..(803): Xaa in position 802 to 803 is any amino acid
  Variant (805)..(812): Xaa in position 805 to 812 is any amino acid
  Variant (813)..(826): Xaa in position 813 to 826 is any or no amino acid
  Variant (828)..(828): Xaa in position 828 is any amino acid
  Variant (830)..(831): Xaa in position 830 to 831 is any amino acid
  Variant (833)..(833): Xaa in position 833 is any amino acid

SEQ ID NO: 9998 - protein, 58 aa, Artificial sequence; identical to SEQ ID NO: 7677
  protein pattern
  Variant (2)..(3): Xaa in position 2 to 3 is any amino acid
  Variant (7)..(7): Xaa in position 7 is Ile or Val
  Variant (8)..(10): Xaa in position 8 to 10 is any amino acid
  Variant (11)..(11): Xaa in position 11 is Pro or Ser
  Variant (13)..(13): Xaa in position 13 is any amino acid
  Variant (14)..(14): Xaa in position 14 is His, Lys or Arg
  Variant (15)..(15): Xaa in position 15 is Ala or Thr
  Variant (16)..(16): Xaa in position 16 is Ala or Gly
  Variant (17)..(18): Xaa in position 17 to 18 is any amino acid
  Variant (20)..(20): Xaa in position 20 is any amino acid
  Variant (21)..(21): Xaa in position 21 is Ile or Val
  Variant (24)..(24): Xaa in position 24 is Ser or Thr
  Variant (27)..(27): Xaa in position 27 is Phe or Tyr
  Variant (28)..(28): Xaa in position 28 is Ala or Thr
  Variant (31)..(31): Xaa in position 31 is any amino acid
  Variant (32)..(32): Xaa in position 32 is Cys or Val
  Variant (35)..(35): Xaa in position 35 is Phe, Ile, Leu or Met
  Variant (37)..(37): Xaa in position 37 is any amino acid
  Variant (38)..(38): Xaa in position 38 is Ile or Val
  Variant (39)..(39): Xaa in position 39 is Ser or Thr
  Variant (45)..(45): Xaa in position 45 is any amino acid
  Variant (48)..(49): Xaa in position 48 to 49 is any amino acid
  Variant (50)..(50): Xaa in position 50 is any or no amino acid
  Variant (52)..(52): Xaa in position 52 is any amino acid
  Variant (53)..(53): Xaa in position 53 is any or no amino acid
  Variant (56)..(56): Xaa in position 56 is any amino acid

SEQ ID NO: 9999 - protein, 32 aa, Artificial sequence; identical to SEQ ID NO: 7678
  protein pattern
  Variant (2)..(8): Xaa in position 2 to 8 is any amino acid
  Variant (9)..(9): Xaa in position 9 is Ile or Val
  Variant (10)..(10): Xaa in position 10 is any amino acid
  Variant (20)..(20): Xaa in position 20 is any amino acid
  Variant (26)..(26): Xaa in position 26 is Ala, Ser or Val
  Variant (29)..(29): Xaa in position 29 is Ile or Met
  Variant (30)..(30): Xaa in position 30 is any amino acid
  Variant (31)..(31): Xaa in position 31 is Phe, Ile or Val
  Variant (32)..(32): Xaa in position 32 is Asp or Asn

SEQ ID NO: 10000 - protein, 26 aa, Artificial sequence
  protein pattern
  Variant (2)..(2): Xaa in position 2 is His or Tyr
  Variant (3)..(3): Xaa in position 3 is Ala, Ser or Thr
  Variant (6)..(6): Xaa in position 6 is any amino acid
  Variant (8)..(8): Xaa in position 8 is Asp, Asn, Pro or Gln
  Variant (9)..(9): Xaa in position 9 is any amino acid
  Variant (11)..(13): Xaa in position 11 to 13 is any amino acid
  Variant (15)..(16): Xaa in position 15 to 16 is any amino acid
  Variant (19)..(20): Xaa in position 19 to 20 is any amino acid
  Variant (22)..(22): Xaa in position 22 is any amino acid
  Variant (23)..(23): Xaa in position 23 is Ala, Gly or Thr
  Variant (24)..(24): Xaa in position 24 is Phe or Tyr
  Variant (25)..(25): Xaa in position 25 is Ile or Val
  Variant (26)..(26): Xaa in position 26 is Cys or Asp
TXXSDXFXXLXXXAXXLIXXGXXXXX

SEQ ID NO: 10001 - protein, 21 aa, Artificial sequence
  protein pattern
  Variant (2)..(2): Xaa in position 2 is Ala or Gly
  Variant (3)..(3): Xaa in position 3 is any amino acid
  Variant (5)..(8): Xaa in position 5 to 8 is any amino acid
  Variant (10)..(10): Xaa in position 10 is any amino acid
  Variant (11)..(11): Xaa in position 11 is Cys, Gly or Thr
  Variant (12)..(13): Xaa in position 12 to 13 is any amino acid
  Variant (15)..(15): Xaa in position 15 is Phe or Tyr
FXXAXXXXGXXXXRXDDTNPE

SEQ ID NO: 10002 - protein, 18 aa, Artificial sequence
  protein pattern
  Variant (2)..(2): Xaa in position 2 is any amino acid
  Variant (3)..(3): Xaa in position 3 is Gln or Arg
  Variant (4)..(4): Xaa in position 4 is Pro, Ser or Thr
  Variant (5)..(5): Xaa in position 5 is any amino acid
  Variant (6)..(6): Xaa in position 6 is Glu, Gln or Ser
  Variant (7)..(7): Xaa in position 7 is any amino acid
  Variant (8)..(8): Xaa in position 8 is Asn or Ser
  Variant (9)..(9): Xaa in position 9 is Ile, Leu or Met
  Variant (10)..(11): Xaa in position 10 to 11 is any amino acid
  Variant (13)..(13): Xaa in position 13 is Asp, Glu or Arg
  Variant (14)..(14): Xaa in position 14 is any amino acid
  Variant (16)..(16): Xaa in position 16 is Lys or Arg
  Variant (17)..(17): Xaa in position 17 is any amino acid
RXXXXXXXXXXFXXMXXG

SEQ ID NO: 10003 - protein, 26 aa, Artificial sequence
  protein pattern
  Variant (2)..(3): Xaa in position 2 to 3 is any or no amino acid
  Variant (5)..(8): Xaa in position 5 to 8 is any amino acid
  Variant (9)..(9): Xaa in position 9 is any or no amino acid
  Variant (11)..(11): Xaa in position 11 is any amino acid
  Variant (13)..(13): Xaa in position 13 is any amino acid
  Variant (14)..(14): Xaa in position 14 is Ile, Leu or Val
  Variant (15)..(15): Xaa in position 15 is Leu or Pro
  Variant (16)..(16): Xaa in position 16 is any amino acid
  Variant (17)..(17): Xaa in position 17 is Gly or Pro
  Variant (18)..(18): Xaa in position 18 is Ile, Leu or Val
  Variant (19)..(19): Xaa in position 19 is any amino acid
  Variant (20)..(20): Xaa in position 20 is Ile, Leu or Val
  Variant (21)..(21): Xaa in position 21 is any amino acid
  Variant (22)..(22): Xaa in position 22 is Ile, Leu or Val
  Variant (23)..(23): Xaa in position 23 is any amino acid
  Variant (24)..(24): Xaa in position 24 is Asp or Asn
  Variant (25)..(25): Xaa in position 25 is any amino acid
  Variant (26)..(26): Xaa in position 26 is Asp, Glu, Pro or Ser
RXXLXXXXXRXMXXXXXXXXXXXXXX

SEQ ID NO: 10004 - protein, 15 aa, Artificial sequence
  protein pattern
  Variant (2)..(2): Xaa in position 2 is any amino acid
  Variant (3)..(4): Xaa in position 3 to 4 is any or no amino acid
  Variant (6)..(6): Xaa in position 6 is any amino acid
  Variant (7)..(7): Xaa in position 7 is Ala or Gly
  Variant (8)..(9): Xaa in position 8 to 9 is Phe or Tyr
  Variant (10)..(10): Xaa in position 10 is Ala, Cys, Ser, Thr or Val
  Variant (11)..(11): Xaa in position 11 is Leu, Met or Val
  Variant (13)..(14): Xaa in position 13 to 14 is any amino acid
  Variant (15)..(15): Xaa in position 15 is Ser or Thr
FXXXRXXXXXXDXXX

SEQ ID NO: 10005 - protein, 14 aa, Artificial sequence
  protein pattern
  Variant (2)..(2): Xaa in position 2 is any amino acid
  Variant (4)..(7): Xaa in position 4 to 7 is any amino acid
  Variant (10)..(11): Xaa in position 10 to 11 is any amino acid
  Variant (12)..(12): Xaa in position 12 is Asp, Glu or Lys
  Variant (13)..(13): Xaa in position 13 is Asp, Asn, Pro or Thr
EXRXXXXLFXXXXP

SEQ ID NO: 10006 - DNA, 660 bp, Escherichia coli K12; identical to SEQ ID NO: 7741
  CDS (1)..(660): transl_table=11

SEQ ID NO: 10007 - protein, 219 aa, Escherichia coli K12; identical to SEQ ID NO: 7742

SEQ ID NO: 10008 - DNA, 735 bp, Glycine max
  CDS (1)..(735)
atggacgccttcaattccttcttcgattcaagaaaccgatggaattacgatactctcaaaaacttccgtcagatttctccggtcgtgcagaatcacctgaagcaggtttattttactctgtgttttgccgtggttgctgcggctgtcggggcttaccttcatgtcctcttgaacattgggggttttcttactacagtggcatgcatgggaagcagcttttggttactctccacacctccttttgaagagaggaagagggtgactttgttgatggccgcatcactgtttcagggttcctctattggacccttgattgatttggctattcatatcgatccaagccttatctttagtgcatttgtgggaacagctttggcctttgcatgcttctcaggagcagctttggttgcaaggcgtagggagtacctgtaccttggtggcttggtttcttctggattgtccatccttctctggttgcactttgcttcttccatctttggaggctcaacagctctctttaagtttgagttgtactttgggctattggtgtttgtaggttacattgtagtagacacccaagaaatagttgagagggcacacttgggcgatctggactatgtaaagcatgccttgaccttgtttaccgatttggtcgcagtttttgtccggattcttgttattatgttgaagaattcgactgagaggaatgagaagaaaaagaagagaagagattga

SEQ ID NO: 10009 - protein, 244 aa, Glycine max
MDAFNSFFDSRNRWNYDTLKNFRQISPVVQNHLKQVYFTLCFAVVAAAVGAYLHVLLNIGGFLTTVACMGSSFWLLSTPPFEERKRVTLLMAASLFQGSSIGPLIDLAIHIDPSLIFSAFVGTALAFACFSGAALVARRREYLYLGGLVSSGLSILLWLHFASSIFGGSTALFKFELYFGLLVFVGYIVVDTQEIVERAHLGDLDYVKHALTLFTDLVAVFVRILVIMLKNSTERNEKKKKRRD

SEQ ID NO: 10010 - DNA, 549 bp, Escherichia coli K12; identical to SEQ ID NO: 2277
  CDS (1)..(549): transl_table=11

SEQ ID NO: 10011 - protein, 182 aa, Escherichia coli K12; identical to SEQ ID NO: 2278

SEQ ID NO: 10012 - DNA, 654 bp, Brassica napus
  CDS (1)..(654)
atgggcgaagaagacgccgcggaattggatcagaacagttataatggtggcgaagattcttccaaagtgcttacattgcccaccgtattaaccctcggccgtgtcgccgccgttccgatcctcgtcgcgaccttctacgttgattgctggtgggggagaactgccacaacgagtatcttcattgcagctgccattacggattggcttgacgggtacattgcgagaaagatgagattaggctctgcgtttggtgcttttttggatccagttgcagataagcttatggtagcagcaacgttgatactgctgtgcactaaacctatggacgctgttgtttttggaccagttccttggttagtgactgtaccttcaattgctatcattggtagagagattactatgtcggcagtaagagagtgggctgcatctcagaacggcaagctttcgaaggctgttgctgtaaatagcttgggaaagtggaaaactgcaacgcagatgatagcgctgaccatactgcttgcaagccgggatagcagttttgagaggctattaccgccgggtattgggttgctctatgtatctgcaggtctctctatatggtctttagttgtttatatgagacagattgtgagagtactgctaaagaagaagtag

SEQ ID NO: 10013 - protein, 217 aa, Brassica napus
MGEEDAAELDQNSYNGGEDSSKVLTLPTVLTLGRVAAVPILVATFYVDCWWGRTATTSIFIAAAITDWLDGYIARKMRLGSAFGAFLDPVADKLMVAATLILLCTKPMDAVVFGPVPWLVTVPSIAIIGREITMSAVREWAASQNGKLSKAVAVNSLGKWKTATQMIALTILLASRDSSFERLLPPGIGLLYVSAGLSIWSLVVYMRQIVRVLLKKK

SEQ ID NO: 10014 - DNA, 813 bp, Escherichia coli K12; identical to SEQ ID NO: 3401
  CDS (1)..(813): transl_table=11

SEQ ID NO: 10015 - protein, 270 aa, Escherichia coli K12; identical to SEQ ID NO: 3402

SEQ ID NO: 10016 - DNA, 900 bp, Oryza sativa
  CDS (1)..(900)
atggccgtggagtcgccattcagggcggatgtgttgaggggcaaggcggcgctggtcaccggcggcggctccggcatcgggttcgagatcgccgcccagctcgcccgccacggcgcgcacgtcgccatcatgggccgccgccgcgaggtcctcgacaaggccgtcgccgccctccgctcccacggcctccgggctgttggttttgagggagatgtgcgcaagcaggaagatgccgcgagagtggttgccgcaacagttcaacattttggtaagctagacattcttgtcaatggggcagctggcaatttccttgcttccccggaggatttgacgcccaaagggttcaggacagtcgttgacattgacacagtgggtacatacactatgtgctatgaagctctaaagtatctgaaaaagggtggccctgggaaaggtccctctactggtggcgtcatcatcaacataagtgctactttgcattacactgcggcctggtaccaaattcatgtctctgctgctaaggcgggcgttgatagtataacaagatcattggctctggaatggggaacagattatgacatcagggtcaatggaattgcaccagggccaattgaaggcactccaggaatgaggaagcttgcacctgaggaaatggccaaggggagtcgggaaataatgcctttatttaagttgggtgaaaaatgggacatagctatggctgcactttaccttgcttctgatgcaggaaaatatgtaaatgggactacagtggttgttgatggaggtctttggctaagtcgccctcgccatattccgaaggaggaagtgaaggagctctcaaaggttgtcgagaagaaggttagggcctctggtgttggtgtgccatcaagcaaattgtga

SEQ ID NO: 10017 - protein, 299 aa, Oryza sativa
MAVESPFRADVLRGKAALVTGGGSGIGFEIAAQLARHGAHVAIMGRRREVLDKAVAALRSHGLRAVGFEGDVRKQEDAARVVAATVQHFGKLDILVNGAAGNFLASPEDLTPKGFRTVVDIDTVGTYTMCYEALKYLKKGGPGKGPSTGGVIINISATLHYTAAWYQIHVSAAKAGVDSITRSLALEWGTDYDIRVNGIAPGPIEGTPGMRKLAPEEMAKGSREIMPLFKLGEKWDIAMAALYLASDAGKYVNGTTVVVDGGLWLSRPRHIPKEEVKELSKVVEKKVRASGVGVPSSKL

SEQ ID NO: 10018 - DNA, 789 bp, Hordeum vulgare
  CDS (1)..(789)
atggcggccggcggcatgagcagggaggagaggtggagcctggccggcgcgacggcgctcgtcaccggcggcagcaaaggcatcggccaggcgatcgtggaggagctggcggggcacggggcgcgggtgcacacgtgcgccaggagcgcggcggagctggaggagtgccgccgccggtgggaggccaaggggctcccggtcaccgtctccgtctgcgacgtctccctgcgcgccagcagggagcagctcgtggagacggtcaagcaagtcttcggcggcaagctcgacatactggtgaacaacgcggcacagattcttgccaaggcggccgtggagtggacatcggaggagtactcgcacctcatggcgaccaatctagagtcgtgcttccacctcagccagctcgcgcaccccttgctcctcaacgcctccatcgctggaggtagcatcgtcaacatatcctcccttgggggcacacttggtttcacgggccttgcgctttacagtatgacaaaaggaggaataaaccagcttacaaggagccttgctactgaatgggcccagaacaagatccgggtgaattgcgtcgccccgggcgcgaccaagagtgacatgttaagcagtctcccactggagattagagagaacgagttggcgaggactccaatgcggcgggcaggcgagccagcggaggtggctgcaatggtgtcgttcctctgcatgccggcggcatccttcgtcaccggccaggtcatcgccgtcgacggtggtcggacaattagtgcttag

SEQ ID NO: 10019 - protein, 262 aa, Hordeum vulgare
MAAGGMSREERWSLAGATALVTGGSKGIGQAIVEELAGHGARVHTCARSAAELEECRRRWEAKGLPVTVSVCDVSLRASREQLVETVKQVFGGKLDILVNNAAQILAKAAVEWTSEEYSHLMATNLESCFHLSQLAHPLLLNASIAGGSIVNISSLGGTLGFTGLALYSMTKGGINQLTRSLATEWAQNKIRVNCVAPGATKSDMLSSLPLEIRENELARTPMRRAGEPAEVAAMVSFLCMPAASFVTGQVIAVDGGRTISA

SEQ ID NO: 10020 - DNA, 573 bp, Escherichia coli K12; identical to SEQ ID NO: 4505
  CDS (1)..(573): transl_table=11

SEQ ID NO: 10021 - protein, 190 aa, Escherichia coli K12; identical to SEQ ID NO: 4506

SEQ ID NO: 10022 - DNA, 681 bp, Glycine max
  CDS (1)..(681)
atgtggatccaaggattcagtttttggatcaaaggtttctctttgctggccttaatatctgtaatttccgctctggaacccgaactgggatcgacccgcgtcgtctttcagacaaagtatggagatattgaatttggtttctatccaactgttgcacctaaaactgtggaccacatttataagcttgtgcgacttggaggctataacactaaccatttctttcgggtggataagggattcgtggcccaagtagcagatgttacaaatggaagatcagctccaatgaacgaggaacaaagaagggaagctgtaaagactgttgttggtgaatttactgaagtcaaacatgttcggggtattctttccatgggaagatatgatgatccagacagtgcttcatcttcattttcaatactacttggagatgcccctcatcttgatggcaagtatgcaatatttggaaaagttactaaaggtgatgaaacgttgacaaagctcgagcaactacctacccgcaaagagggtatatttgtaatgccgatggaacgcatcactatcctgtcgtcatattactatgatacagagacagaaaattgcgaggaagacagatcaattttgaagcgcagactagccgcctcagctattgaagttgaaagacagaggatgaaatgcttcccctga

SEQ ID NO: 10023 - protein, 226 aa, Glycine max
MWIQGFSFWIKGFSLLALISVISALEPELGSTRVVFQTKYGDIEFGFYPTVAPKTVDHIYKLVRLGGYNTNHFFRVDKGFVAQVADVTNGRSAPMNEEQRREAVKTVVGEFTEVKHVRGILSMGRYDDPDSASSSFSILLGDAPHLDGKYAIFGKVTKGDETLTKLEQLPTRKEGIFVMPMERITILSSYYYDTETENCEEDRSILKRRLAASAIEVERQRMKCFP

SEQ ID NO: 10024 - DNA, 615 bp, Glycine max
  CDS (1)..(615)
atggcgaaaacgacgtcgttgctgctctttacactgctcctcttcggaaccctagctctcatccaggcgaagaaatcgaaggaggatttgaaggaggtgacccacaaggtttactttgatgttgagattaatggaaaagaagcaggtcgtattgtaatgggtctttatgggaaggctgttccaaaaactgcagaaaacttccgagcactttgcacaggggaaaagggaactggtaaaagtggaaagcctctccattacaaaggtagctcattccatagaattattcctagctttatgcttcaaggaggtgattttacacaaggaaatggaatgggtggagaatcaatttacggagagaagtttgctgatgagaacttcaagttaaagcatactggaccaggacttctatcaatggcaaatgctggtcctaataccaatggttcacaatttttcattacaactgtgacaactagctggttggacggaaggcatgttgtttttggtaaagttctttctggaatggatgttgtttacaagattgaagctgaaggaacacaaagtggcactcccaagagcaaggttgtgattgttgacagtggtgaactccctctataa

SEQ ID NO: 10025 - protein, 204 aa, Glycine max
MAKTTSLLLFTLLLFGTLALIQAKKSKEDLKEVTHKVYFDVEINGKEAGRIVMGLYGKAVPKTAENFRALCTGEKGTGKSGKPLHYKGSSFHRIIPSFMLQGGDFTQGNGMGGESIYGEKFADENFKLKHTGPGLLSMANAGPNTNGSQFFITTVTTSWLDGRHVVFGKVLSGMDVVYKIEAEGTQSGTPKSKVVIVDSGELPL

SEQ ID NO: 10026 - DNA, 621 bp, Linum usitatissimum
  CDS (1)..(621)
atgaactcgaaatctttggccgtcgctctgttatggggtgctctacttttcggaaccctagcgctcatccaggctaagaaatcggacgagaagttgaaagagatcactcataaagtttatttcgatgtagagatcgacggcaagcccgccggtcgcattaccatgggtctctatggcaaggcagttcctaagacagcagagaatttcagagcattgtgcacaggtgaaaagggcgttggaaagagtgggaaacctctacactacaagggtagctcattccacaggatcattcctagctttatgctccaaggaggtgacttcacacatggtgatggaagaggaggggagtcaatatatggggagaagttcgctgacgagaacttcaagttgaagcacactggccctggacttctgtcaatggcgaacgccggtaaagacaccaatggttcacagttcttcatcacaactgttacaactagctggctggacggcaggcacgtcgtgttcggaaaggtgctatccggaatggatgttgtgtacaaagttgaagcggaaggcaagcaaagtgggacaccaaagagcaaggtcgtcattgttgacagcggcgaactacctctataa

SEQ ID NO: 10027 - protein, 206 aa, Linum usitatissimum
MNSKSLAVALLWGALLFGTLALIQAKKSDEKLKEITHKVYFDVEIDGKPAGRITMGLYGKAVPKTAENFRALCTGEKGVGKSGKPLHYKGSSFHRIIPSFMLQGGDFTHGDGRGGESIYGEKFADENFKLKHTGPGLLSMANAGKDTNGSQFFITTVTTSWLDGRHVVFGKVLSGMDVVYKVEAEGKQSGTPKSKVVIVDSGELPL

SEQ ID NO: 10028 - DNA, 672 bp, Linum usitatissimum
  CDS (1)..(672)
atgacgagaatgtggatcttagtcgccggtttggcaattgcagcggcggccggcgtctcatttgcggagcctgagctcagctcagctcgtgttgtcttccagaccaattacggggatatcgagttcggattctacccatcggtggcgccgataacggtccagcacattttcaagcttgttcggcttggaggatacaacactaatcatttcttcagggttgacaagggatttgtggctcaagtggcggatgtggctggtgggcgatcggctccgatgaatgaagagcaaagactggaggcagagaagactgtgattggtgaatttagtgacgttaagcatgttcgaggcatcctgtccatggggaggtatgctgatccaaacagtggatcttcctcgttttcaatcctacttgggaatgcacctcatctggacggccaatatgcaatatttggtaaagttactaaaggtgatgacacattaacgaagctggagcagcttcctacccggactgagggaatctttgtgatgccaacagaacggatcactattttgtcatcatattactacgatactaacatggagaagtgcgacgaggagaggtcaattttgaaacgcagactcgctgcgtctgctattgaaatcgaaagacagagaatgaaatgcttcccatga

SEQ ID NO: 10029 - protein, 223 aa, Linum usitatissimum
MTRMWILVAGLAIAAAAGVSFAEPELSSARVVFQTNYGDIEFGFYPSVAPITVQHIFKLVRLGGYNTNHFFRVDKGFVAQVADVAGGRSAPMNEEQRLEAEKTVIGEFSDVKHVRGILSMGRYADPNSGSSSFSILLGNAPHLDGQYAIFGKVTKGDDTLTKLEQLPTRTEGIFVMPTERITILSSYYYDTNMEKCDEERSILKRRLAASAIEIERQRMKCFP

SEQ ID NO: 10030 - DNA, 630 bp, Hordeum vulgare
  CDS (1)..(630)
atgtttataaactaccgatcaccgctatcaattatattagcccttgcaattgggctagtattctggtcccgatctgttaacgcactcaaaggacccaaaattactagcaaagtatattttgatattctccatggggaaaaagagctaggacgcatagttattggcctctacggcggtactgtcccgattacagcagagaactttcgagctttggcaaccggcgaaaaaggaggagacttaacatttgaaggatcaacctttcaccgtgtaatcaagaacttcatgatacaaggaggagattttacaaagggtgatggtacaggtggaaagtcaatatacggtgataaatttgccgacgagaacttcaagttgaaacactctcgaaagggtcttctctctatggccaacgcgggaaaagataccaatggctctcaattctttattaccacctccacacctggttatctcgacggcagacacgtcgtttttggagaagtcatggaaggctacgaaatagttgaaaaaatcgaggatgttcccaaaaatggtgaaaagccaaaagaagctgtcaagatagctaaatgtggagaattgcctgtagctgaagaaggtattcacgtcgaactctaa

SEQ ID NO: 10031 - protein, 209 aa, Hordeum vulgare
MFINYRSPLSIILALAIGLVFWSRSVNALKGPKITSKVYFDILHGEKELGRIVIGLYGGTVPITAENFRALATGEKGGDLTFEGSTFHRVIKNFMIQGGDFTKGDGTGGKSIYGDKFADENFKLKHSRKGLLSMANAGKDTNGSQFFITTSTPGYLDGRHVVFGEVMEGYEIVEKIEDVPKNGEKPKEAVKIAKCGELPVAEEGIHVEL

SEQ ID NO: 10032 - DNA, 642 bp, Hordeum vulgare
  CDS (1)..(642)
atggcgatgagggcgtggaggcggagcgcggcggcgagggccccggcgcacctgtgcctgtggctggcgctcgtcgccgccaccctggtgctcgcccaggggaagaagtccaacctgtcggaggtgacgcacaaggtctacttcgacatcgagatcgacggcaagcccgcaggtcgggttgtcatgggactttttggcaaggctgttcctaaaactgcagagaacttcagagcactctgcacaggagagaaaggtatgggcaacagtggcaaacctctccactacaaggggagttcattccacagaattatccccagcttcatgatccaaggaggtgacttcacccttggcgatggaaggggtggtgaatcaatctacggcacaaagttcgccgatgagaacttcaagctcaagcacactggaccaggctacctttccatggccaatgctgggagagataccaatggatcccagtttttcatcaccactgtgactacgagctggttggatggcaagcacgtcgtgttcggcaaggtgttgtctgggatggacgtggtatacaaggttgaggctgaaggcaagcagaacgggacaccaaagagcaaagttgtcattgctgacagcggagaagtgccgctgtga

SEQ ID NO: 10033 - protein, 213 aa, Hordeum vulgare
MAMRAWRRSAAARAPAHLCLWLALVAATLVLAQGKKSNLSEVTHKVYFDIEIDGKPAGRVVMGLFGKAVPKTAENFRALCTGEKGMGNSGKPLHYKGSSFHRIIPSFMIQGGDFTLGDGRGGESIYGTKFADENFKLKHTGPGYLSMANAGRDTNGSQFFITTVTTSWLDGKHVVFGKVLSGMDVVYKVEAEGKQNGTPKSKVVIADSGEVPL

SEQ ID NO: 10034 - DNA, 483 bp, Hordeum vulgare
  CDS (1)..(483)
atgtcggtgacgctgcacacgaacctgggggacatcaaggtggaggttttctgcgaccaggtgccgcggacggcggagaacttcctggccctgtgcgccagcggctactacgacgggacggtgttccaccgcaacatcaaggggttcatggtgcagggcggcgacccgacggggacgggcaagggcggggcgtccatctggggcggcaagttcgcggacgagttccgggaggcgctcaagcacggggcgaggggcaccctgtccatggccaactcggggcccaacaccaacggcagccagttcttcatcacctacgccaagcagccccacctcaacggccactacaccgtgttcgccaaggtcatccacggcttcgacgtgctcgacctcatggagaagacccccaccggccccgccgaccgccccctcgccgagatccgcctcaaccgcgtcaccgtccacgccaacccgctcgccggataa

SEQ ID NO: 10035 - protein, 160 aa, Hordeum vulgare
MSVTLHTNLGDIKVEVFCDQVPRTAENFLALCASGYYDGTVFHRNIKGFMVQGGDPTGTGKGGASIWGGKFADEFREALKHGARGTLSMANSGPNTNGSQFFITYAKQPHLNGHYTVFAKVIHGFDVLDLMEKTPTGPADRPLAEIRLNRVTVHANPLAG

SEQ ID NO: 10036 - DNA, 492 bp, Helianthus annuus
  CDS (1)..(492)
atgccaggcgcagaaggaggtccaccggaggtaactctcgaaacatccatgggctctttcaccgttgagatgtacgataagcacgcacctaggacttgcaaaaacttcattgaactgtctcgaaggggctactacaacaacgttaagtttcacagaatcattaaggattttattgttcaaggaggtgatcccactggcactggtagaggtggagaatctatttacggttcaaagtttgaggatgagatcaccccaaagttgaagcatacgggagctggtatcttatctatggctaatgctggtccgaatacaaatggaagtcagttctttatcacattggccccagcgcaatcgcttgatggaaagcacacgatatttggaagagtgtgcagaggaatggagattgtcaagagacttggtagtgttcagactgataataccgacaggccaattcatgacgtgaagatactacggacagcagttaaggattga

SEQ ID NO: 10037 - protein, 163 aa, Helianthus annuus
MPGAEGGPPEVTLETSMGSFTVEMYDKHAPRTCKNFIELSRRGYYNNVKFHRIIKDFIVQGGDPTGTGRGGESIYGSKFEDEITPKLKHTGAGILSMANAGPNTNGSQFFITLAPAQSLDGKHTIFGRVCRGMEIVKRLGSVQTDNTDRPIHDVKILRTAVKD

SEQ ID NO: 10038 - DNA, 1026 bp, Escherichia coli K12; identical to SEQ ID NO: 5124
  CDS (1)..(1026): transl_table=11

SEQ ID NO: 10039 - protein, 341 aa, Escherichia coli K12; identical to SEQ ID NO: 5125

SEQ ID NO: 10040 - DNA, 1074 bp, Brassica napus
  CDS (1)..(1074)
atggggaaaatggaggtagagaggaaaacaacaggctgggctgcgagagacccttctgggttactctctccttacacttacactctcagagagacaggaccagaggatgttcacataagaatcatatgctgtggaatctgccacacagatctccatcaaaccaaaaacgatcttggcatgtcaaactaccccatggttcctgggcacgaggttgttggggaagtggtggaggtgggatcagatgtgagcaagttcaccgcaggggatatagttggagttggttgtctcgttggatgctgcggaggttgtagcccctgcgagagagatctggaacagtattgtcccaagaagatctggagctacaacgatgtttacatcgatggtcaaccaacacaaggcggtttcgctagagccaccgtcgttcaccaaaagtttgtggtgaagattccagaaggaatggctgttgagcaggcggcaccactactgtgtgccggtgtgacagtgtacagtccactggctcacttcggtctgaagcgaccaggcctaagaggaggtatactagggctaggtggagttggtcacatgggtgtgaaaatagccaaagcaatgggtcaccatgtgactgtcataagctcatcaaacaagaagaaagaagaggctttgaaagatcttggagcagatgattacgtgatcggatccgaccaatcgaagatgaacgaattggcggattcaatggattacataatcgacacggtccctgttcatcatgcacttgagccttacttgtctctgcttaggcttgatgggaaactcatactcatgggagtcataagcaatccattacaatttctcactcctatggttatgcttgggaggaaagtgataacggggagcttcattgggagcatgaaggaaacagaggagatgcttgagttctgtaaagaaaagggtttgagttcgatcatcgaagtagtgaagatggattatgtgaacactgcgtttgagagactcgagaagaacgatgtgcgttataggttcgtggttgatgtcgaaggaagcaaacttgaggcttga

SEQ ID NO: 10041 - protein, 357 aa, Brassica napus
MGKMEVERKTTGWAARDPSGLLSPYTYTLRETGPEDVHIRIICCGICHTDLHQTKNDLGMSNYPMVPGHEVVGEVVEVGSDVSKFTAGDIVGVGCLVGCCGGCSPCERDLEQYCPKKIWSYNDVYIDGQPTQGGFARATVVHQKFVVKIPEGMAVEQAAPLLCAGVTVYSPLAHFGLKRPGLRGGILGLGGVGHMGVKIAKAMGHHVTVISSSNKKKEEALKDLGADDYVIGSDQSKMNELADSMDYIIDTVPVHHALEPYLSLLRLDGKLILMGVISNPLQFLTPMVMLGRKVITGSFIGSMKETEEMLEFCKEKGLSSIIEVVKMDYVNTAFERLEKNDVRYRFVVDVEGSKLEA

SEQ ID NO: 10042 - DNA, 1074 bp, Brassica napus
  CDS (1)..(1074)
atgggagaggtccttaagaaggaggcgtacggactggctgtaaaagacgaatctggagttatctcgcctttccgtttctcaagaagggagacaggagaaaatgatgtgaggttaaaagtgttgttctgtggaatttgccacacagatttaagcatggccataaacgagtgggggtttactagttacccccttgtccccgggcatgaaatagtgggcgtggtgactgaagtcggagccaaagtgactaaattcaacgccggagacaaagtgggagttggttatatggtcagctcatgcgggtcatgtgaaacctgcattgatgaccaagagaactactgtccaaaaatgatcctaacgtccggaggcaagtattacgatgacactataacatatggtggttactccgaccatatggtttgtgaagaggactacatcatccgtattccagaaaatcttcccttagacgctaccgcgccgctactctgcgctgggaccaccgtctattccccgatgaagtatcacgggcttgacaagccgggtatgcacattggtgtggtgggactaggcggtttaggtcatgtagctgtgaaatttgctaaggctatgggtactaaggttacagttattagtacttcggataggaagagagacgaggcgttaactcggcttggtgcggatctgttcttggtgagccgtgacccggaacagatgaaggatgcaatgggtactatggatggtattattgataccgtatctgcttctcatccagttcttccgattcttgatttgcttaaatataagggtaaacttattatggttggtgcacctgataaaccgcttgagcttccggttctgcctctcatctttgggaaaaagatggtggtgggaagtatggtaggagggataaaagagactcaagagatgatggatttggccggaaaacacaacatcacggcagatattgagcttatctctgcggattatgtcaacactgccatgaaacggctcgagaaggctgacgttagataccgttttgtgattgatgttgccaacaccttgaagcctagtccttaa

SEQ ID NO: 10043 - protein, 357 aa, Brassica napus
MGEVLKKEAYGLAVKDESGVISPFRFSRRETGENDVRLKVLFCGICHTDLSMAINEWGFTSYPLVPGHEIVGVVTEVGAKVTKFNAGDKVGVGYMVSSCGSCETCIDDQENYCPKMILTSGGKYYDDTITYGGYSDHMVCEEDYIIRIPENLPLDATAPLLCAGTTVYSPMKYHGLDKPGMHIGVVGLGGLGHVAVKFAKAMGTKVTVISTSDRKRDEALTRLGADLFLVSRDPEQMKDAMGTMDGIIDTVSASHPVLPILDLLKYKGKLIMVGAPDKPLELPVLPLIFGKKMVVGSMVGGIKETQEMMDLAGKHNITADIELISADYVNTAMKRLEKADVRYRFVIDVANTLKPSP

SEQ ID NO: 10044 - DNA, 1074 bp, Brassica napus
  CDS (1)..(1074)
atgggaaaggtgcctgcgacggaggcgttcggattggccgcgaaagacgaatccggagttctctcgcctttccgtttctcaagaagggagacgggagagaaggatgtgaggttaaaagtgttgttctgtggaatttgccacactgatgtatgtatggccagaaacgagtggggatttactacttaccctctcgtccccgggcatgagattgttggcgtggtgactgaagtcggagctaaagtgattaaattcaaagccggagacaaagtcggagttggttatatgctcagctcgtgccggtcatgtgacatctgcaccgatgaccaagagaaccactgtccaaaaatgattatgacgtccggaggaaagtactacgatgacaccatgacttatggtggttactctgaccacctggtttgtgaagaggattacatcatccgtattcctgaaaatctcccgttagacgctgccgcgccgctactctgcgctggggtcacggtttattcaccgttgaagtctcacggactcgacaagcccggaatccacattggtgtggtgggactaggcggtttaggtcacgtagcagtgaaatttgccaaggctatgggtactaaggttacggttattagttcgtcagatggtaagagagacgaggcgattaatcggcttggtgcggatctgttcttggtgagccgtgacccggaagagatgaaggatgcaatggggactatggatggtattattgatacagtatctgccactcatccgcttcttccgcttcttggtttgctaaaatataagggaaaatttattatggttggtgcacccgataaaccacttgaccttccagctttaccgctcatcttagggaagaagatggtggtgggaagtatgacaggagggataaaagagtctcaagagatggttgattttgccggtaaacacaacataacggcagatattgagcttatctctgcggattatgtcaacatggctatggaacggctagaaaagggggatgttagataccgttttgtgattgatgttgccaacacaatgaagcctactccttag

SEQ ID NO: 10045 - protein, 357 aa, Brassica napus
MGKVPATEAFGLAAKDESGVLSPFRFSRRETGEKDVRLKVLFCGICHTDVCMARNEWGFTTYPLVPGHEIVGVVTEVGAKVIKFKAGDKVGVGYMLSSCRSCDICTDDQENHCPKMIMTSGGKYYDDTMTYGGYSDHLVCEEDYIIRIPENLPLDAAAPLLCAGVTVYSPLKSHGLDKPGIHIGVVGLGGLGHVAVKFAKAMGTKVTVISSSDGKRDEAINRLGADLFLVSRDPEEMKDAMGTMDGIIDTVSATHPLLPLLGLLKYKGKFIMVGAPDKPLDLPALPLILGKKMVVGSMTGGIKESQEMVDFAGKHNITADIELISADYVNMAMERLEKGDVRYRFVIDVANTMKPTP

SEQ ID NO: 10046 - DNA, 1083 bp, Brassica napus
  CDS (1)..(1083)
atggcgaaatctccagagacagagcatccgaacaaagcctttggttgggctgccaaagacaaatctggtgtactctctcctttccatttctccagaagagacaatggtgacaatgatgtgacagtgaaaatcttgtactgtggagtgtgccacactgatttacataccatcaaaaacgactggggtttctcctattatcctgtagttcccgggcatgaaatagttggaatagctacaaaagttggcaaaaacgtgactaaattcagagaaggagaccgtgttggagtaggagtgatcactggttcttgccagtcttgcgaatcttgtaaccaagatcttgaaaactactgtccccaaatgtctttcacctacaactccataggatccgatggaaccaagacctacggtggatattcggagtccattgtggtcgatcaacgttttgtcttacagtttcccgagggattgcctagcgattcgggtgcccccttgctgtgtgctggtatcactgtgtatagtccaatgaagtactatggtatgaccgagccagggaagcatttgggcgtggctggacttggtgggcttggtcatgttgctgtcaagattggtaaagcctttggtttgaaagttactgtgattagttcttctcctagtaaagaagacgaagctattaatcgacttggtgctgattcgtttcttgtctcatctgatcctcagaagatgaaggctgcaattggaactatggactatattatcgatacggtatcagcagtacatgctctgtttccattgcttggtttactcaaagtcaatggaaagcttgtcacgttaggcttacctgagaagcctcttgagctaccaatcttccctcttgttctcggaagaaaaatggtgggaggaagtgacattggagggatgaaggagacacaagagatgcttgagttctgcgctaagcataacataacggcagatattgagctgatcaagatggatgagattaacactgcgatggagaggcttgctaagtctgatgttaggtacaggttcgtgatcgacgtggctaactccttgagccctccatga

SEQ ID NO: 10047 - protein, 360 aa, Brassica napus
MAKSPETEHPNKAFGWAAKDKSGVLSPFHFSRRDNGDNDVTVKILYCGVCHTDLHTIKNDWGFSYYPVVPGHEIVGIATKVGKNVTKFREGDRVGVGVITGSCQSCESCNQDLENYCPQMSFTYNSIGSDGTKTYGGYSESIVVDQRFVLQFPEGLPSDSGAPLLCAGITVYSPMKYYGMTEPGKHLGVAGLGGLGHVAVKIGKAFGLKVTVISSSPSKEDEAINRLGADSFLVSSDPQKMKAAIGTMDYIIDTVSAVHALFPLLGLLKVNGKLVTLGLPEKPLELPIFPLVLGRKMVGGSDIGGMKETQEMLEFCAKHNITADIELIKMDEINTAMERLAKSDVRYRFVIDVANSLSPP

SEQ ID NO: 10048 - DNA, 1110 bp, Triticum aestivum
  CDS (1)..(1110)
atggcgcctacggcaacgacgacgacgacggcggcggagcagcagcagcacccgaggaaggcggtggggctcgcggcgcacgacgcatccggccacctctcgcccatccgcatcccccgaaggagcactggtgacgacgacgtggccataaaggtgctctactgcggcatctgccactccgacctgcacaccatcaagaacgactggaggaacgccatctaccccgtcgtccccgggcacgagattgccggggtggtgacggaggtcggcaagaacgtggcggggttcgcggccggcgacagggtgggcgtgggctgcatggtgaacacctgccgggcctgcgagagctgcgaggagggcgccgagaactactgcgccagggtcgtcctcacctacaactcccgcgacagggacggcgccgtcacccgcggcggctactccgacctggtcgtcgccgacgcgcgcttcgtcgtccgcttccccgacgccctgccgctcgacgtcgccgcgccgctgctctgcgcgggcgccaccgtgtacgcccccatgcggcgccacgggctgggcgcgcccggcagccacgtgggcgtgatcggcctcggcgggctcgggcacgtcgccgtcaagttcgccagggcgttcggggcggcgaaggtgacggtgatcagcacgtcgcccgggaagcgggaggaggcgctggagcggctgggcgcggacgcgttcgtcctcagcaccgacgcggcggagatgaaggccgccgcgggcaccatgcacggcatcgtcaacacggcgtccgccgccgcgtccctgcacccgtacctggcgctcctcaaaccccacggcaagatgatcctgctcggcatccccgataagcccctgcaagtctccgcattcgctctcatcggcggcggcaagactcttgccgggagctgcatggcgagcatcagcgagacgcaggagatgctagacttcgccgccgagcatggcgtggcggcggacgtcgaggtgatcggcgccggggaggtgaacgcggccatggagcgcctggccaagggcgacgtcaggtaccgcttcgtcatcgacgtcggcaacaccctcaaggcggattga

SEQ ID NO: 10049 - protein, 369 aa, Triticum aestivum
MAPTATTTTTAAEQQQHPRKAVGLAAHDASGHLSPIRIPRRSTGDDDVAIKVLYCGICHSDLHTIKNDWRNAIYPVVPGHEIAGVVTEVGKNVAGFAAGDRVGVGCMVNTCRACESCEEGAENYCARVVLTYNSRDRDGAVTRGGYSDLVVADARFVVRFPDALPLDVAAPLLCAGATVYAPMRRHGLGAPGSHVGVIGLGGLGHVAVKFARAFGAAKVTVISTSPGKREEALERLGADAFVLSTDAAEMKAAAGTMHGIVNTASAAASLHPYLALLKPHGKMILLGIPDKPLQVSAFALIGGGKTLAGSCMASISETQEMLDFAAEHGVAADVEVIGAGEVNAAMERLAKGDVRYRFVIDVGNTLKAD

SEQ ID NO: 10050 - DNA, 1074 bp, Linum usitatissimum
  CDS (1)..(1074)
atggcagagaaacaacatccggtgccggcctacggattggctgccagagaccagtctggacttgtttctcctttcaacttctccagaagagaaacaggggaaaccgatgtgaaatttaaggttctctactgtgggatttgccattccgatcttcatatgctcaagaatgaatggggctcctccacctatcccattgtccctgggcatgagatagtgggacaagtgacagaggttggaagcaaagtggagaaatacagagttggagacagagtaggcgttggatgcatggttgggtcgtgccgatcttgcaacaactgctcccaaagcatcgaaaattactgccccaagatgatccaaacctatggaggaacctaccatgatggcacccctacctacggaggctactccgacgtcatggtctgcgacgagcatttcgtggtccgagtccccgactccctgcccttagacgttgccgcacctctgctctgcgctggtatcacactttacagccctttaaagttctatggactggacaagccgggcctccacgtcggcattgtcgggctcggtggactgggccacgtgggtgtcaagtttgctaaagccatgggtgtgaaagtcaccgtgattagtacctcccctggcaagaagcaggaggcaatcgagcgacatggtgctgatgccttcttggtgagccttgaccaggaacaaatgaaggctgcaatggggacgatggatggtattatcgacacggtatcagctgttcacccaataatgccattgattgggctgttaaagacacaaggcaagttggtgttggttggtgctccagagaagcctcttgagttgccagttttccctctgctcatgggaaggaagatagtaggagggagttgcattggaggaatgaaggagacgcaagagatgcttgatttcgcagcaaagcacaacatcactgcggacattgaggttatatcagcagactatgtgaacactgcaatggagaggcttgccaagaatgatgttaaatacagattcgtcatcgatgttgccaacactatgcaagctccttga

SEQ ID NO: 10051 - protein, 357 aa, Linum usitatissimum
MAEKQHPVPAYGLAARDQSGLVSPFNFSRRETGETDVKFKVLYCGICHSDLHMLKNEWGSSTYPIVPGHEIVGQVTEVGSKVEKYRVGDRVGVGCMVGSCRSCNNCSQSIENYCPKMIQTYGGTYHDGTPTYGGYSDVMVCDEHFVVRVPDSLPLDVAAPLLCAGITLYSPLKFYGLDKPGLHVGIVGLGGLGHVGVKFAKAMGVKVTVISTSPGKKQEAIERHGADAFLVSLDQEQMKAAMGTMDGIIDTVSAVHPIMPLIGLLKTQGKLVLVGAPEKPLELPVFPLLMGRKIVGGSCIGGMKETQEMLDFAAKHNITADIEVISADYVNTAMERLAKNDVKYRFVIDVANTMQAP

SEQ ID NO: 10052 - DNA, 1101 bp, Linum usitatissimum
  CDS (1)..(1101)
atggcgaataatgatggtgaaatcgcagtgggaaagagagatggaggagaggaagagaacatggctgcttggcttctgggtatccaaaccctcaagattcagccttaccaactccctactcttggtcctcatgatgtcaaggtccggattaaggctctaggcatttgcggaagtgatgttcatcatttcaagactatgagatgtgctaatttcatagtgaagaaaccaatggtgatcggccatgaatgtgctggcatcattgaagagattggcagtgaagtcaagagcctctcaacaggtgaccgtgtagccttagagcctggcatcagttgctcaaggtgtaacctttgcaagaatggccgctacaacttgtgctccgaaatgcgattcttcggctctccacctaccaacggctctcttgccaacaaggtggtgcatcccgcaagcctatgctacaagctccccgagaacgtgagcttggaggaaggagcgatgtgcgagcccctaagtgtaggggtccacgcttgtcgtagagcacaggttggccccgagactagtgtcctgatcttgggagctggaccaatcgggctcatcaccttgctggttgctcgagcattcggatcccctcgcgttgtgatgaccgatgttgatgagacccgtctatccattgctaagagcctcggtgctgatgagactatccaagtctcgacagatccgaaggatgttagtgaggaagtgatgaaagtgcagaatgctatgggatcagggattgatgttaccttggactgtgttggatataacaagaccatgactactgctctgaatgccacacgttctggtggcaaagtttgcctaataggattagctcttagtgagatgactgtccctcttactcctgctgctgccagggaagtagatgtgattggcatatttcggtaccggaacacatggccactctgccttgatttcttgaagactggcaagatttatgtgaagccattgataactcacaggtttaagttcacacaggaggatattgactcggcgttcgagaccagtgctcgtggtgggaacgcgatcaaggttatgtttaacctgtaa

SEQ ID NO: 10053 - protein, 366 aa, Linum usitatissimum
MANNDGEIAVGKRDGGEEENMAAWLLGIQTLKIQPYQLPTLGPHDVKVRIKALGICGSDVHHFKTMRCANFIVKKPMVIGHECAGIIEEIGSEVKSLSTGDRVALEPGISCSRCNLCKNGRYNLCSEMRFFGSPPTNGSLANKVVHPASLCYKLPENVSLEEGAMCEPLSVGVHACRRAQVGPETSVLILGAGPIGLITLLVARAFGSPRVVMTDVDETRLSIAKSLGADETIQVSTDPKDVSEEVMKVQNAMGSGIDVTLDCVGYNKTMTTALNATRSGGKVCLIGLALSEMTVPLTPAAAREVDVIGIFRYRNTWPLCLDFLKTGKIYVKPLITHRFKFTQEDIDSAFETSARGGNAIKVMFNL

SEQ ID NO: 10054 - DNA, 1071 bp, Hordeum vulgare
  CDS (1)..(1071)
atggctgctgaatccgggacagagagtggcaactgcagtgcttgggcagcaaaagatccttctggactactctccccgcacactttcaaccgtaggactgtacgacatgatgatgtttctttgaggatcacacattgtggtgtctgttatgccgatgttatctggacaaaaaataggcacaatgactcggtgtaccctttagtccctgggcatgagattgctggagttgtaaccgaggttggttcagacgtcaagggcttcaagctgggtgaccatgtggctgtggggacatatgtcaactcatgccgtgactgtgacaactgcaatagcttcctcgagaaccactgctcaaaatttgttttcactttcaatggtgttgatacggatggtactgtcacaaagggaggatattccagtcacgttgtagttcatgaacggtactgctataaaatacctgatggctacccactggaaaaggccgcacctttagtttgtgctggaatcactgtgtacactccgatgacgcgacataacatgaaccagccagggaagtcacttggtgttgtcggtcttggtgggttgggtcacatggcagtgaaatttgggaaagcctttggactgaaggtgactgttttgagtacaagtgaatcgaaaagagatgaagcaatcaaccttcttggtgcagataattttgtggtttcatcagataaaaaacagatggagtccctgaaaagttccctggacttcattgtcgatactgcctctggtgaccacccatttgacccgtatcttgcgcttctgaaagttggtggcctgatggcactagttggcttccctggagaaatcagagtgcatccagcaacacttaatctgggtgcacggactttatctgggagtgtaaccggaggcacgaaggacacacaggagatgataaacttctgtgcggcaaacaaaatctacccagacattgagttgataaagatagactacatcaaccaggctctcgagaggcttgtcaaccgggatgtgaggtaccggtttgtaatcgacatagagagctctttaaagtga

SEQ ID NO: 10055 - protein, 356 aa, Hordeum vulgare
MAAESGTESGNCSAWAAKDPSGLLSPHTFNRRTVRHDDVSLRITHCGVCYADVIWTKNRHNDSVYPLVPGHEIAGVVTEVGSDVKGFKLGDHVAVGTYVNSCRDCDNCNSFLENHCSKFVFTFNGVDTDGTVTKGGYSSHVVVHERYCYKIPDGYPLEKAAPLVCAGITVYTPMTRHNMNQPGKSLGVVGLGGLGHMAVKFGKAFGLKVTVLSTSESKRDEAINLLGADNFVVSSDKKQMESLKSSLDFIVDTASGDHPFDPYLALLKVGGLMALVGFPGEIRVHPATLNLGARTLSGSVTGGTKDTQEMINFCAANKIYPDIELIKIDYINQALERLVNRDVRYRFVIDIESSLK

SEQ ID NO: 10056 - DNA, 1083 bp, Helianthus annuus
  CDS (1)..(1083)
atggcaacctcaccggaatccgagcatccgatcaaggcgtatggttatgcggcccgcgacacgtctggattactttcccctctcaccttctccagaagggctactggagagaaagatgtgaggttcaaagttctttactgcggaatctgtcattccgatcttcacgttgtcaaaaacgaatggggatttaccaagtacccgattactccagggcatgagattgttggtgtggtgacagaagtaggaagcaaagtggagaatttcaagattggagacaaagttggggttgggtgcttggtgggatcatgtagatcatgtcaaagttgtgcttctgactatgaacagtattgcgataagcaggtacaaacttatggtttcaccaactttgatggcacacagacgtacggtggatactccgatcacatggtttcagatgagcattttgtactccgttggccggagaacttaccacttgattctggtgcaccgttgctatgtgctgggatcacaacttacagccctctcaagtactttggattggacaagcctggtacgaaagtgggcgtggttgggctcggtgggctcggtcatgttgctgtgaagatggctaaggcatttggggctgaagttactgtttttagtacttcccctgctaaggagaaagaagcaattcagggacttaaagctgaccatttcgtaaacagtaaagatggacttcaaatgcaggctgctaagggcacactcgatggcatcatcgacacagtgtccgcaaatcatccaattgcgccattgcttaatgcacttacaccccatggaaagcttgttcttgttggtgcacctgagaagccacttgaagtagcagcattttcgttgatcatgggaaggaagcttgttgcgggtagtaacattggtggaattaaagagactcaggaaatgcttgactttgcagcaaagcatgggataactgcagatatagaggttataccgatagactatgtgaacacagcgatggaaaggctgttgaaatccgatgtgaggtaccgatttgtgatcgatgtggcgaactcgatcaaggctgaatag

SEQ ID NO: 10057 - protein, 360 aa, Helianthus annuus
MATSPESEHPIKAYGYAARDTSGLLSPLTFSRRATGEKDVRFKVLYCGICHSDLHVVKNEWGFTKYPITPGHEIVGVVTEVGSKVENFKIGDKVGVGCLVGSCRSCQSCASDYEQYCDKQVQTYGFTNFDGTQTYGGYSDHMVSDEHFVLRWPENLPLDSGAPLLCAGITTYSPLKYFGLDKPGTKVGVVGLGGLGHVAVKMAKAFGAEVTVFSTSPAKEKEAIQGLKADHFVNSKDGLQMQAAKGTLDGIIDTVSANHPIAPLLNALTPHGKLVLVGAPEKPLEVAAFSLIMGRKLVAGSNIGGIKETQEMLDFAAKHGITADIEVIPIDYVNTAMERLLKSDVRYRFVIDVANSIKAE

SEQ ID NO: 10058 - DNA, 486 bp, Escherichia coli K12; identical to SEQ ID NO: 5585
  CDS (1)..(486): transl_table=11

SEQ ID NO: 10059 - protein, 161 aa, Escherichia coli K12; identical to SEQ ID NO: 5586

SEQ ID NO: 10060 - DNA, 507 bp, Hordeum vulgare
  CDS (1)..(507)
atggcggccttgccattggccacggcggaagtctgtgacgccaactcgcacctgatcaccggcggcgagctccgggcgctccagccaatcttccagatctacgggaggcggcaggtcttcgcagggcccatcgtgacgctcaaggtgtttgaggacaacgttctcgtgcgcgagttcctggaggagaagggccagggcagggtgctggtggtggacggcggcggcagcctgcggtgcgccatcctgggcggcaaccccgtccagcaggcgcagaacaacgggtgggcgggcatcgtcgtgaacggctgcatccgggacgtggacgagatcaacgggtgcgacatcggcgtgcgcgccctcaactcacacccgatgaaggccaacaagaagggcatgggcgagaagcacgtccccatcaccatcgcgggcacccggatctgcgacggcgagtggctctacgccgacaccgatggcatcctggtctccaggaccgagctgattgtgtag

SEQ ID NO: 10061 - protein, 168 aa, Hordeum vulgare
MAALPLATAEVCDANSHLITGGELRALQPIFQIYGRRQVFAGPIVTLKVFEDNVLVREFLEEKGQGRVLVVDGGGSLRCAILGGNPVQQAQNNGWAGIVVNGCIRDVDEINGCDIGVRALNSHPMKANKKGMGEKHVPITIAGTRICDGEWLYADTDGILVSRTELIV

SEQ ID NO: 10062 - DNA, 1482 bp, Escherichia coli; identical to SEQ ID NO: 9529
  CDS (1)..(1482): transl_table=11

SEQ ID NO: 10063 - protein, 493 aa, Escherichia coli; identical to SEQ ID NO: 9530

SEQ ID NO: 10064 - DNA, 1485 bp, Helianthus annuus
  CDS (1)..(1485)
atggcgatggttcaggcatttcgtcgaacacctggtggatcggccatcgttgcagattcggttcggtttattacatgctggagacatttctctacggcttttagagaggaaagagatacgtttggaccaattcaagtcccgtctgataagttatggggagctcaaacacaaagatctttacaaaattttgaaattggaggtgaccgtgaaagaatgccagaaccaatcattcgttcttttggaatcctcaaaaagtgtgctgctaaggtaaacatggaatacggccttgatccatccatagggaaagcaataatggaagctgcacaagaagtggcagaggggaaattaaacgatcactttccactagttatatggcagactggcagtggcactcaaagcaatatgaatgccaacgaggtcattgcaaatagagcagctgaaatacttggccataagcgcggcgacaagtttgtgcacccaaatgaccatgttaacagatcacagtcttcaaatgatacattcccgactgttatgcatattgcagctgcaaccgaaatcaactctagacttatcccaaaacttaagcagctgcatacagccctacaagctaagacaaatgagttctctgatatagttaaaattgggcgtactcatactcaagatgcaacacccttgactcttgggcaagagttcagcggctataccacacaagtgaagtatggaattgatagggtcatgtgcactctccctcgcttgtatcagcttgcacaaggtggcactgctgtagggacaggattgaacacaaagaaaggatttgatgtaaagattgctgcagctgttgctgatgaaacaaggttaccatttataacagccgaaaataagttcgaggcgctggctgcgcatgacgcctttgttgaagctagtggagcgttaaacacaattgccacttctcttatgaagattgctaatgatatacggtttctaggaagtggtccacgttgcggtcttggggaacttattcttcctgagaacgaacctggtagcagcatcatgcctgggaaagtgaatcctacgcagtgtgaagctctaactatggtttgtgctcaggcaattggaaaccatgtagcccttacagtgggcggttcaaatggacattttgagcttaatgttttcaagccgatgattgctagtactcttttacactcaatcagacttctagccgatgcatctgcttcttttgaaaagaattgtgtgagtggcattcaagcaaatagggaaaggatatcaaagctattgcacgagtcacttatgcttgtgacatccttaaatcctaaaattggctatgacaatgctgcagcggttgccaaaactgcccacaagcagggatgcacactcaaggaagctgctcttaaactgggagtgttgaatagtgaagaattcgatcagcttgtagtgccggaaaagatgattggccccagtgattga

SEQ ID NO: 10065 - protein, 494 aa, Helianthus annuus
MAMVQAFRRTPGGSAIVADSVRFITCWRHFSTAFREERDTFGPIQVPSDKLWGAQTQRSLQNFEIGGDRERMPEPIIRSFGILKKCAAKVNMEYGLDPSIGKAIMEAAQEVAEGKLNDHFPLVIWQTGSGTQSNMNANEVIANRAAEILGHKRGDKFVHPNDHVNRSQSSNDTFPTVMHIAAATEINSRLIPKLKQLHTALQAKTNEFSDIVKIGRTHTQDATPLTLGQEFSGYTTQVKYGIDRVMCTLPRLYQLAQGGTAVGTGLNTKKGFDVKIAAAVADETRLPFITAENKFEALAAHDAFVEASGALNTIATSLMKIANDIRFLGSGPRCGLGELILPENEPGSSIMPGKVNPTQCEALTMVCAQAIGNHVALTVGGSNGHFELNVFKPMIASTLLHSIRLLADASASFEKNCVSGIQANRERISKLLHESLMLVTSLNPKIGYDNAAAVAKTAHKQGCTLKEAALKLGVLNSEEFDQLVVPEKMIGPSD

SEQ ID NO: 10066 - DNA, 1437 bp, Escherichia coli K12; identical to SEQ ID NO: 6056
  CDS (1)..(1437): transl_table=11

SEQ ID NO: 10067 - protein, 478 aa, Escherichia coli K12; identical to SEQ ID NO: 6057

SEQ ID NO: 10068 - DNA, 1485 bp, Helianthus annuus; identical to SEQ ID NO: 10064
  CDS (1)..(1485)

SEQ ID NO: 10069 - protein, 494 aa, Helianthus annuus; identical to SEQ ID NO: 10065

SEQ ID NO: 10070 - DNA, 741 bp, Saccharomyces cerevisiae; identical to SEQ ID NO: 6823
  CDS (1)..(741)

SEQ ID NO: 10071 - protein, 246 aa, Saccharomyces cerevisiae; identical to SEQ ID NO: 6824

SEQ ID NO: 10072 - DNA, 720 bp, Brassica napus
  CDS (1)..(720)
atgtcgggacctcagtgctgcgaaaacccgccggctcttaacccggtctccgggtcgggtcatgtggagaagctgggtgggctcgatgcttacgtctctggctctcttgattccaagttgtgcgtcatcctcatctctgatgtttttgggtatgaagctccaaacttgagggcgcttgcggataaggttggagcttctggattctatgttgtggttcctgattacttctatggagatccttttgatgcctctaatcaggagagacccatctctctctggatcaaagaccatggcgctgataagggatttgaagacacaaagccagtaattgaagccataaagaccaaaggcataactgctattggagctgcagggatgtgttggggtgcaaaagtggtggtggaattgtctaagcaagagcttgttcaagcagatgttttgcttcatccttcttttgtcacggtcgatgatatcaagggtgggaaggtaccaattgctatactaggagctgagattgatcaggtgtctccaccagcactcttgaagcaatttgaggagattcttgcttccaaacctgaggtgaatagttatgtgaagatatacccgaaagtggcacacggttggacagttaggtacaagacggatgacccagacgcggttaaagctgcagaagaagcgcacaaggagatgcttgattggtttgtgacttacgttaagtga

SEQ ID NO: 10073 - protein, 239 aa, Brassica napus
MSGPQCCENPPALNPVSGSGHVEKLGGLDAYVSGSLDSKLCVILISDVFGYEAPNLRALADKVGASGFYVVVPDYFYGDPFDASNQERPISLWIKDHGADKGFEDTKPVIEAIKTKGITAIGAAGMCWGAKVVVELSKQELVQADVLLHPSFVTVDDIKGGKVPIAILGAEIDQVSPPALLKQFEEILASKPEVNSYVKIYPKVAHGWTVRYKTDDPDAVKAAEEAHKEMLDWFVTYVK

SEQ ID NO: 10074 - DNA, 720 bp, Glycine max
  CDS (1)..(720)
atgtcagggcctcagtgctgttcaaatccacccagcctgaaccccagtggaggaggtgggcatgtcaataaagtgggtggtgtcgattcctatttcagtggctcttctcactctaaactcgcccttcttatgctctccgatgtctttggttatgaagcaccaaatttaaggaagcttgctgacaaagttgcagctgctgggtattatgtggttgttcccgacctcttggatggtgaaccctttaattatcagaattctaacagacccttacctgtgtggctaaaagatcatggaccggacaaaggttctgaagctacaaaacccataattgaggccttgaaaagtaaaggtgtttctgttattgccgctgttggtttttgttggggtgcaaaggttgtggttgaacttgtaaagtccaaacttatacaaactgctgtgctaatgcatccatcgtttgtctctctggacgacatcaaggctgttgatattccaattgctatactcggagctgagattgaccaatattctcctcccgagcttgtgaaacaatttgaacaagtcctagctgctaaagctggggttgctagttttgttaaaatatttcccaaaatttcacacggttgggctgtgagatacaacgctgaagatgcagaagctgtgaaggttgcagaggaggctcaccgggacatgttggactggcttgctaaacatcacaagtga

SEQ ID NO: 10075 - protein, 239 aa, Glycine max
MSGPQCCSNPPSLNPSGGGGHVNKVGGVDSYFSGSSHSKLALLMLSDVFGYEAPNLRKLADKVAAAGYYVVVPDLLDGEPFNYQNSNRPLPVWLKDHGPDKGSEATKPIIEALKSKGVSVIAAVGFCWGAKVVVELVKSKLIQTAVLMHPSFVSLDDIKAVDIPIAILGAEIDQYSPPELVKQFEQVLAAKAGVASFVKIFPKISHGWAVRYNAEDAEAVKVAEEAHRDMLDWLAKHHK

SEQ ID NO: 10076 - DNA, 1017 bp, Saccharomyces cerevisiae; identical to SEQ ID NO: 7301
  CDS (1)..(1017)

SEQ ID NO: 10077 - protein, 338 aa, Saccharomyces cerevisiae; identical to SEQ ID NO: 7302

SEQ ID NO: 10078 - DNA, 1155 bp, Hordeum vulgare
  CDS (1)..(1155)
atgctcgccgcctgcgcctggaggctgtcccagcgagccgtcacgttccttccccgcgtgcgaccccaaatcctaaaccctttccccatggccgccgccgccggcgccgcctcgcccaagcgcctgagggtatactcgtccgccgccggcgacgccgacccctccaacggcgcggggaacggcaggcgcgtggggacccacaacggcagcttccactgcgacgaggcgctcggctgcttcctcatccgcctcacctcccagttcgcgggcgccgacgtcgtccgcacccgcgactcccagatccttgattcgctggaggccgtgcttgacgttggtggtgtctatgatcccagccgtcatcgctatgatcatcaccagaagggcttcaacgaggtctttggatatggctttaacacgaaacttagcagtgctgggcttgtttacaagcattttggtaaggagataattgcgaaggagcttcagcttaatgaggaccatgaagatgttcaccgcgtgtatcttgccatatacaaaagctttgttgaggcacttgatgcaatcgataatggaatcaatcaatatgacacggagcaaacccccaagtatgtgaacaatacacacttgtcttcacgtgttgggcgccttaatccagattggactgatccagatcaatcacctgagaaggaaaatgccgcgtttcaacaggcaatggctcttgccggaagtgagtttatggagagtgtccgctttcatgttaagtcgtggctacctgcaagatctattgtcatggagtgtttgctgtcaagaggaaatgttgatccaagtggagaaatcatggttttagatagattctgcccgtggaaacttcatctatttgagctagagcaggagctgaagactgatcccctgaccaagtatgtgctgtatgaggatgagaggagcaaaggctggcgagtgcaagccgtctctgttgcacccgacagattcgagagccgaaaggctctcccagagaagtggaggggcatgagagatgatgaactgtccaaggaaaccggcatccctggctgtgtgttcatccatatgagtggattcattggtgggaacaagacctacgagggagccttggaaatggccagagctgccctcaaatgctaa

SEQ ID NO: 10079 - protein, 384 aa, Hordeum vulgare
MLAACAWRLSQRAVTFLPRVRPQILNPFPMAAAAGAASPKRLRVYSSAAGDADPSNGAGNGRRVGTHNGSFHCDEALGCFLIRLTSQFAGADVVRTRDSQILDSLEAVLDVGGVYDPSRHRYDHHQKGFNEVFGYGFNTKLSSAGLVYKHFGKEIIAKELQLNEDHEDVHRVYLAIYKSFVEALDAIDNGINQYDTEQTPKYVNNTHLSSRVGRLNPDWTDPDQSPEKENAAFQQAMALAGSEFMESVRFHVKSWLPARSIVMECLLSRGNVDPSGEIMVLDRFCPWKLHLFELEQELKTDPLTKYVLYEDERSKGWRVQAVSVAPDRFESRKALPEKWRGMRDDELSKETGIPGCVFIHMSGFIGGNKTYEGALEMARAALKC

SEQ ID NO: 10080 - DNA, 735 bp, Saccharomyces cerevisiae; identical to SEQ ID NO: 8177
  CDS (1)..(735)

SEQ ID NO: 10081 - protein, 244 aa, Saccharomyces cerevisiae; identical to SEQ ID NO: 8178

SEQ ID NO: 10082 - DNA, 1068 bp, Brassica napus
  CDS (1)..(1068)
atgggtggtgcggtgaaggatatcgcttcaaagtctgagcttgataacttgcgccagagcggcgcaccaatcgcgcttcacttctgggcatcgtggtgtgatgcttcgaagcagatggatcaagtcttctctcacctcgctactgatttccctcgcgcccacttctttagggtagaagctgaggaacatcctgagatatctgaagcttactctgtttctgctgttccctttttcgtcttcttcaaggatggcaaagctgtggatacccttgaaggcgcagatccatcgagtttagccaacaaggttgccaaaatagctggttctagtacttcttctgagcctgctgctccggcaagcctagggttagctgcagggccaatgattctcgaaaccgtgaaggagaatgcgaaagctaccgtgaaagaccgagctcagcctgcgcccaccactgaaaatctcaatgaccgtttggagaagctcactaactctcaccctgtcatgttgttcatgaaaggcactcctgaagagcctaggtgcgggtttagcaggcaagtagtgggcgttttgagagaggagaatgttgatttcggaagcttcgatatactttctgacaacgaagtgcgtgaaggtctgaagaaattctcaaactggccaacgtttcctcagctgtactgcaacggggagcttctaggaggatcagacattgtcctggagatgcaaaagagcggcgagctgagacaagtgttgtctgagaaagggaaacagagtcttgaagataggttgaagacgttgattaactcggagaaggttatgcttttcatgaaaggttcgccggatgaaccaaagtgtgggtttagctcaaaagtggtgaaagcacttagagatgagaatgtgaatttcgggtcgtttgacatattgagtgatgaagaagtgagacaagggataaagagtttctcaaactggcctacgtttcctcagctttactataaaggtgagttagttggaggatgtgatatcattatggagctgagtaacagtggtgacctcggagcaacactatctgagtaa

SEQ ID NO: 10083 - protein, 355 aa, Brassica napus
MGGAVKDIASKSELDNLRQSGAPIALHFWASWCDASKQMDQVFSHLATDFPRAHFFRVEAEEHPEISEAYSVSAVPFFVFFKDGKAVDTLEGADPSSLANKVAKIAGSSTSSEPAAPASLGLAAGPMILETVKENAKATVKDRAQPAPTTENLNDRLEKLTNSHPVMLFMKGTPEEPRCGFSRQVVGVLREENVDFGSFDILSDNEVREGLKKFSNWPTFPQLYCNGELLGGSDIVLEMQKSGELRQVLSEKGKQSLEDRLKTLINSEKVMLFMKGSPDEPKCGFSSKVVKALRDENVNFGSFDILSDEEVRQGIKSFSNWPTFPQLYYKGELVGGCDIIMELSNSGDLGATLSE

SEQ ID NO: 10084 - DNA, 360 bp, Saccharomyces cerevisiae; identical to SEQ ID NO: 7429
  CDS (1)..(360)

SEQ ID NO: 10085 - protein, 119 aa, Saccharomyces cerevisiae; identical to SEQ ID NO: 7430

SEQ ID NO: 10086 - DNA, 408 bp, Brassica napus
  CDS (1)..(408)
atgatacgtcaatggatgcagactttcaaacgcaggaacggagggaggaacaagcacaaccgtgggcacgtgaagccaatcagatgctccaactgcggcaaatgttgcccaaaggacaaggccatcaagaggtttatcgtgaggaacattgtggagcaggctgctattagagatgttcaggaagctagcgtatacgatgggtacacattgcctaagctgtatgctaagacgcagtactgtgtctcctgtgcgatacactctcacgttgttagagttcgttcccgcaccaaccgcagagttcgtactcccccgcctcgttttgttagacgcaaggaggatgctcccaagcctggacaacctggtcaggctcctcgtcctgctggagctgcagctgccccgcgtgcctga

SEQ ID NO: 10087 - protein, 135 aa, Brassica napus
MIRQWMQTFKRRNGGRNKHNRGHVKPIRCSNCGKCCPKDKAIKRFIVRNIVEQAAIRDVQEASVYDGYTLPKLYAKTQYCVSCAIHSHVVRVRSRTNRRVRTPPPRFVRRKEDAPKPGQPGQAPRPAGAAAAPRA

SEQ ID NO: 10088 - DNA, 393 bp, Brassica napus
  CDS (1)..(393)
atgactttcaagcgcagaaacggtggtaggaacaagcacaaccgtggtcatgtgaacccaatcaggtgttccaactgcgggaaatgctgccccaaggataaggcgattaagagattcctcgtcaggaacatcgttgagcaagctgccatcagagatgtacaagaagctagtgtctacgatggttacactctaccaaagttgtacgctaagatgcagtactgtgtttcatgtgctatccactctcacgttgtgagagttcgatccagcactaaccgtagagttcgtaccccaccgccccgttttgccagacgcaaggaggatgcgcccaagcctggacatcctggtcaggcccctcgacctgctggtggtgccccagctgctcctcgtgcctaa

SEQ ID NO: 10089 - protein, 130 aa, Brassica napus
MTFKRRNGGRNKHNRGHVNPIRCSNCGKCCPKDKAIKRFLVRNIVEQAAIRDVQEASVYDGYTLPKLYAKMQYCVSCAIHSHVVRVRSSTNRRVRTPPPRFARRKEDAPKPGHPGQAPRPAGGAPAAPRA

SEQ ID NO: 10090 - DNA, 393 bp, Brassica napus
  CDS (1)..(393)
atgactttcaagcgcaggaacggagggaggaacaagcacaaccgtggccacgtcaagccaatcagatgctccaactgcggcaaatgctgccccaaagacaaggccatcaagaggttcatagtgaggaacatcgtggagcaggctgccattagagatgttcaggaagccagcgtctacgatgggtacacgttgccaaagctgtatgcgaagacgcagtactgtgtctcgtgtgctatccactctcacgttgttcgtgtccgttcccgcactaaccgcagggttcgtactccccctccacgtttcgtcagacgcaaggaggatgcgcccaagcctggacaacttggtcaggctcctcgtcctgctggagctggagcagctgcaccgcgtgcctga

SEQ ID NO: 10091 - protein, 130 aa, Brassica napus
MTFKRRNGGRNKHNRGHVKPIRCSNCGKCCPKDKAIKRFIVRNIVEQAAIRDVQEASVYDGYTLPKLYAKTQYCVSCAIHSHVVRVRSRTNRRVRTPPPRFVRRKEDAPKPGQLGQAPRPAGAGAAAPRA

SEQ ID NO: 10092 - DNA, 1155 bp, Saccharomyces cerevisiae; identical to SEQ ID NO: 7558
  CDS (1)..(1155)

SEQ ID NO: 10093 - protein, 384 aa, Saccharomyces cerevisiae; identical to SEQ ID NO: 7559

SEQ ID NO: 10094 - DNA, 963 bp, Hordeum vulgare
  CDS (1)..(963)
atggactaccgcaacaagctcgtgctcgcgcccatggtccgcgcgggtactctgccgtttaggctactggctgctgaatatggcgccgatattacgtatggagaagaaataatagatcataagtttgtgcactgtcaacgtgttacaaatgaatctcttgggacaactgattttttggaaagagggactgatagtgttgttttccgaacatgcccgcaagaaagggatagggttgtcttccaaatgggcacatcagatgctgtgagagcacttaaagctgctgagattgtgtgcaatgatgttgctgctatagatatcaacatgggttgtccaaaggctttttctgtcagtggaggaatgggttctgcattactctccaaacctgagcttatacatgatattttgactacattgcggaggaacttgaacacaccagtgacatgtaaaatccgtcttttgaacacacgccaggacactgtggagctggcacgccggattgagaagtgtggtgttccagctctggctgtccatggaagaaaggtcaaagacaggccaagggatccggctaagtgggatgagattgctgatgttgtgtccgcactgtcaattccagttatagctaatggggatgtatttgagtacgaagattttaagagaatcaaagatgctacaggtgccacatctgtaatggctgctagaggtgccttgtggaatgcctccattttctctcctaatggcaaagtaccttgggaggatttcaaaagagagtatgtgagaaagactattttgtgggacaattgtattaagagcacaaagacgacactaagagaaataataatgcactatatttgccttgaactccctgaagggaaaggtgtgataaagtgtggttcgtcagcagatgtagcgagactttatggggaagaggattactataattttgttgtttcaaataggaaatga

SEQ ID NO: 10095 - protein, 320 aa, Hordeum vulgare
MDYRNKLVLAPMVRAGTLPFRLLAAEYGADITYGEEIIDHKFVHCQRVTNESLGTTDFLERGTDSVVFRTCPQERDRVVFQMGTSDAVRALKAAEIVCNDVAAIDINMGCPKAFSVSGGMGSALLSKPELIHDILTTLRRNLNTPVTCKIRLLNTRQDTVELARRIEKCGVPALAVHGRKVKDRPRDPAKWDEIADVVSALSIPVIANGDVFEYEDFKRIKDATGATSVMAARGALWNASIFSPNGKVPWEDFKREYVRKTILWDNCIKSTKTTLREIIMHYICLELPEGKGVIKCGSSADVARLYGEEDYYNFVVSNRK

SEQ ID NO: 10096 - DNA, 1344 bp, Escherichia coli
  CDS (1)..(1344): transl_table=11
atgcatgtgcttaacattctctgggtggtattcggcattggtctgatgctggtactgaatttgaagttcaaaatcaattcaatggtggctttgttggtggcggcgctgtccgtcgggatgctggcgggcatggatttgatgtcgctgctgcacactatgaaagcgggcttcggcaacacgctgggggaactggctatcatcgtggtgttcggtgcggtcatcggtaaattgatggtcgactccggcgcggctcaccagatagcgcatacgctgctggcgcgtctcggtctgcgctatgtacagctgtcggtgattatcatcggcctgatttttggtctggcgatgttctatgaagtggcctttatcatgttagcgccgctggttattgttattgccgccgaagctaaaattccgttcctgaaactggcgatcccggcagtagcagctgccactaccgcacattcactgttcccaccgcagccgggtccggtggcgctggtgaatgcttatggcgcggatatggggatggtttatatctatggcgtactggtgacgatcccaagtgtaatctgcgcaggtctgatcctgccgaagttcctcggcaatcttgagcgcccaacgccatcattcctgaaagcagatcaaccggtagatatgaataatctgccctctttcggcgtttcgattctggtgccgctgatcccggcgatcattatgatctctaccaccatcgccaatatctggctggtaaaagatacccctgcctgggaagtggttaactttatcggttcctcgccgattgcaatgtttattgcgatggtggttgcattcgtactctttggcaccgcacgtggtcatgacatgcagtgggtgatgaacgcttttgaaagcgcggtgaagagtattgcaatggtgattctgatcatcggtgcgggtggcgtgctgaagcagaccatcatcgacaccggcattggcgacaccatcggcatgttgatgtcccacggcaatatctcgccctacatcatggcatggctgatcactgtgctaattcgtctggcgacgggtcagggtgtcgtttcggcgatgaccgccgccgggattatcagtgctgcaatcctagatccagcaactggtcagctggttggcgtgaatccggcgctgctggtactggcgacggctgcgggttccaacaccctcacccacattaacgatgcatctttctggttgttcaaaggttactttgacctgtcagtaaaagacacgttgaaaacctggggtctgctggagctggtcaactccgtggttgggctgattattgtgctgattattagcatggtagcgtaa

SEQ ID NO: 10097 - protein, 447 aa, Escherichia coli
MHVLNILWVVFGIGLMLVLNLKFKINSMVALLVAALSVGMLAGMDLMSLLHTMKAGFGNTLGELAIIVVFGAVIGKLMVDSGAAHQIAHTLLARLGLRYVQLSVIIIGLIFGLAMFYEVAFIMLAPLVIVIAAEAKIPFLKLAIPAVAAATTAHSLFPPQPGPVALVNAYGADMGMVYIYGVLVTIPSVICAGLILPKFLGNLERPTPSFLKADQPVDMNNLPSFGVSILVPLIPAIIMISTTIANIWLVKDTPAWEVVNFIGSSPIAMFIAMVVAFVLFGTARGHDMQWVMNAFESAVKSIAMVILIIGAGGVLKQTIIDTGIGDTIGMLMSHGNISPYIMAWLITVLIRLATGQGVVSAMTAAGIISAAILDPATGQLVGVNPALLVLATAAGSNTLTHINDASFWLFKGYFDLSVKDTLKTWGLLELVNSVVGLIIVLIISMVA

SEQ ID NO: 10098 - DNA, 1344 bp, Yersinia pestis
  CDS (1)..(1344): transl_table=11
atggaatggattaatatcctgtgggtcatgttgggtattggcttaatgctagtgctcaatatccgctaccagattaactcaatggtcgcattgctgctggcagctctgctagtagggactctcgcgggcatggacctgcttaagctgctgcataccattaaggctgggtttggtggcacgctaggtgaactggcgataatcgtcgtatttggtgcggtgatcggcaaactgatggtggactctggcgctgctcatcagatagcccagacgctattgcgccgattcgggcttaaatatgttgaagccgcggtaattatcatcggcctgatctttggtctggcgatgttttatgaggttgcctttattattttggcaccactggtcattgctattgcggtcgaagccaagataccgttcctcaaactggcgatcccggcagttgctgcagcgacgacggctcactccctattcccaccacagccggggccggttgcgctggttgccgcttatggcgcagacatggggatggtttatatctatggagttctggttgctattccttcagtgatctgtgccgggcttattttgccaaagttcttgggcaatctggagcggccaattccgacgttcctgaagtctgacaacccgattgatgaaaacaatctgccgtcgttcagtacctcgattttggtaccgttaattcccgctttcatcatgatttttaccaccatagccaatatctggttggttaaagggaccacgtcgtacaccattctcaatttcattggctcatcacctattgccatgtttatcgccatgttggttgccttcgtacttttcggcaccggacgcggtcataaaatggaatgggtcatgcactcatttgaaggggcggtaaaaggcgttgccatggtcatcctgatcatcggtgcgggcggtgcgctaaagcaggtgatcattgataccgggatcggcgatacgattggcatgctgatgtctgctggtggtgtatcaccttatattatggcttggctgattacggtgctgattcgtctgacaacgggccaaggcgtggtttcggcgatgaccgccgcagggattatcggtgctgcggtaatggacccggtcactgggaccattacctcagtcgatccggcactgttggtgctggcgacagcggcaggttctaacacctttactcatatcaatgacgcctcattctggctgtttaaaggttattttgagctgtcgattaaagatacgctgaagacttggggcctgctcgaattgaccaactcggtggttggtttggcggtggtactgctgatcagcatgtttgtctag

SEQ ID NO: 10099 - protein, 447 aa, Yersinia pestis
MEWINILWVMLGIGLMLVLNIRYQINSMVALLLAALLVGTLAGMDLLKLLHTIKAGFGGTLGELAIIVVFGAVIGKLMVDSGAAHQIAQTLLRRFGLKYVEAAVIIIGLIFGLAMFYEVAFIILAPLVIAIAVEAKIPFLKLAIPAVAAATTAHSLFPPQPGPVALVAAYGADMGMVYIYGVLVAIPSVICAGLILPKFLGNLERPIPTFLKSDNPIDENNLPSFSTSILVPLIPAFIMIFTTIANIWLVKGTTSYTILNFIGSSPIAMFIAMLVAFVLFGTGRGHKMEWVMHSFEGAVKGVAMVILIIGAGGALKQVIIDTGIGDTIGMLMSAGGVSPYIMAWLITVLIRLTTGQGVVSAMTAAGIIGAAVMDPVTGTITSVDPALLVLATAAGSNTFTHINDASFWLFKGYFELSIKDTLKTWGLLELTNSVVGLAVVLLISMFV

SEQ ID NO: 10100 - DNA, 1320 bp, Pantoea citrea
  CDS (1)..(1320): transl_table=11
atgccaattacaataatagcgctcggggtaatactgctgctggtcctgatgattgttttcaaggccaacggctttttatctctgatttttgtctccatcgtcgtaggtatagccgaagggatgacaccgttgcaggccctggcttctgtacaaaaaggggttggcggtactctgggcagccttgcgatgattcttggttttggtgccatgctcggtaagctggtgtcagataccggggccgcccaacgggtggcgaccacgttgattgcggcttttggtaaacagcgggtgcaatgggctctgatggtgacagggctgattgtcgggctggccatgttttatgaaattggttttgtcctgttgttaccgctggtgtttaccgtggtggccgccgccggtatgccattactgtatgtggggctgccgatggtggctgcattgtcagtgacccattgcttcctgcctccgcacccggggccgacggcgatcgccgctatcttcggggccaatctgggtaccacactgttgtatggcataattattaccctgccaacggtgattgtggccggtccggtattttctaagttcctaaaaaactttgaaaaagaaccgccggaagggctgtataaccccaaaattttcgccgaacatgagttgcccggattcgctattagtatatttgctgcagtcatcccggtgatccttatggcgattgccgcagtttttgaactcacaactccgaaagagaatccgctccgtcagtttttcgaatttattggtaaccctgcgatcgcgctgtttattgccgtggtgatcgccgtatttaccctcggattgcgcaatggccggaaaatgggcgaagtcatggagatgtgcagctcctcaatttcgtcaattgccatgattgtatttatcattgccggtggcggggcatttaaacaagtcctggtggacagtggggtgggcgattttatcgcaggaatgatgaaaggatcgtcattgtcgccactattgatgtgctggaccgtggcggcaatgctgcgagttgcgttgggatcagccacagtagcggcgattactaccgcgggtattgtcactccgattatcgcggtgactcacgcagaccctgcactaatggtgttggcggtagggtctggtagcgtgatcgcctcgcatgttaatgaccccggtttctggttattcaaaggctactttaatctgagcgtgactgaaacactgaaaacctggactgtgatggaaacactgatttcggtgatgggtctggccggagtccttattcttaactcagtactgcactaa

SEQ ID NO: 10101 - protein, 439 aa, Pantoea citrea
MPITIIALGVILLLVLMIVFKANGFLSLIFVSIVVGIAEGMTPLQALASVQKGVGGTLGSLAMILGFGAMLGKLVSDTGAAQRVATTLIAAFGKQRVQWALMVTGLIVGLAMFYEIGFVLLLPLVFTVVAAAGMPLLYVGLPMVAALSVTHCFLPPHPGPTAIAAIFGANLGTTLLYGIIITLPTVIVAGPVFSKFLKNFEKEPPEGLYNPKIFAEHELPGFAISIFAAVIPVILMAIAAVFELTTPKENPLRQFFEFIGNPAIALFIAVVIAVFTLGLRNGRKMGEVMEMCSSSISSIAMIVFIIAGGGAFKQVLVDSGVGDFIAGMMKGSSLSPLLMCWTVAAMLRVALGSATVAAITTAGIVTPIIAVTHADPALMVLAVGSGSVIASHVNDPGFWLFKGYFNLSVTETLKTWTVMETLISVMGLAGVLILNSVLH

SEQ ID NO: 10102 - DNA, 1464 bp, Kineococcus radiotolerans SRS30216
  CDS (1)..(1464): transl_table=11
atggagaccgtcacacccgcctacggcacgagcacgctgctgctcatcgccgccgccgccgtggccctgctgctgctgctgatcatccgcttcaagctgcacgcgttcgtcgcgctcgtgctcgtcagcgccgtcaccgccgtcgtcaccgtcggtcccgacgggagcctgctcgacgtcgtcgacgtcctgaccgccggcttcggcagcacgctggccagcgtcgccctgctcgtcggcttcggcgtcatgatcgggcgcctgctggaggtcaccggcggcgcgcaggtgctcgccgacaccctcgtggcccgcttcggcgagaagcgcgcccccctcgccctcggcgtcgcctcgctgatcttcgggttcccgatcttcttcgacgccgggctcgtggtcttcctgccgatcatcttctcggtggcccgccgcttcggcggctccgtcctgacgtacgccctgcccgccgcgggcgccttcgccgtcatgcacgccttcgtgcccccgcaccccggcccggtcgcggccggtgagctgctcggcgccgacatcggcgtcctcatcctcgtgggcctcgtcctcgccgtccccacgtggttcaccgccagctacctcttcggcctgtgggccgggcgccgcaccgacgtgccgctgcccgcggagtgggccgagcgcctggccgcgaacacggccgggcaggccgggccctccggcaccgccggcgccgccaccgccccgggcgcgacgggcgggacgggcaccccgggcccggccgccccgcgcttcagcaccgtcctcctcgtgctgctgctgcccctggtgctgatcttcctcaacacgggcctgaacacgctggccaccgccggcgccgtcgacggcgaggcgacctgggtgcaggtgctgcgcctggtggggcagacgcccatcgcgctgctcatcgccgtgctcgtcaccatggtcgtcctcagccggggccggctgacgcgcggcgaggtcgaggacctggccaacagctccctcgggccggtctgcgccgtcatcctcatcaccggcgccggcggcatgttcggcggggtcctgcgcgccagcggcatcggcggcgccctggccgacaccctggccgcgaccggcctgcccgtcatcgtggccgcgttcatcatctccctgggcctgcgcgtggcgcagggctcggcgacggtggcgctgaccaccaccgccgggctgatggcccccaccgtcgaggcgaccgcgggcctgtccagcctcgaccccgcgttcatcgtcatcgccatcgccgccggcgcgaccgcgctcagccacgtcaacgactccggcttctggctcgtggggcgcttcctgggcatggacgtgcccacgacgctgcggacgtggacggtcatggagaccctcatcggcctcgtcggcttcgcgctggccttcctcgggtacctggtcctgtga

SEQ ID NO: 10103 - protein, 487 aa, Kineococcus radiotolerans SRS30216
METVTPAYGTSTLLLIAAAAVALLLLLIIRFKLHAFVALVLVSAVTAVVTVGPDGSLLDVVDVLTAGFGSTLASVALLVGFGVMIGRLLEVTGGAQVLADTLVARFGEKRAPLALGVASLIFGFPIFFDAGLVVFLPIIFSVARRFGGSVLTYALPAAGAFAVMHAFVPPHPGPVAAGELLGADIGVLILVGLVLAVPTWFTASYLFGLWAGRRTDVPLPAEWAERLAANTAGQAGPSGTAGAATAPGATGGTGTPGPAAPRFSTVLLVLLLPLVLIFLNTGLNTLATAGAVDGEATWVQVLRLVGQTPIALLIAVLVTMVVLSRGRLTRGEVEDLANSSLGPVCAVILITGAGGMFGGVLRASGIGGALADTLAATGLPVIVAAFIISLGLRVAQGSATVALTTTAGLMAPTVEATAGLSSLDPAFIVIAIAAGATALSHVNDSGFWLVGRFLGMDVPTTLRTWTVMETLIGLVGFALAFLGYLVL

SEQ ID NO: 10104 - DNA, 1353 bp, Xanthobacter autotrophicus Py2
  CDS (1)..(1353): transl_table=11
atgctgggcatgagcaaggacacatttctactggtcgacgcggcggtgaccatcatcggcctcatcgtcctcatcacgcgcttcaaggtccaccccttcgtggcgttgatcctggccgccggcttcctggggctcagctccggcatgccggtggacctcatcatgaagtcgttccaggacggcttcggcggcgtgctcggcttcgtcggcatcgtgctcggcctcggcaccatgctgggcaagctgatggccgaatcgggcggcgcagaccagatcgcccagaccctcatcaatgccttcggcaaacagcgggtgcactgggccatcatgctcgccgccttcctggtgggcattcccctgttcttcgaaatcggcttcgtgctgctcatcccgcttgtcttcgtcatggcgagccgcaccggcgtgtcgctggtgaaggtgggcatttcgcttttggcgggtctctcggcggtgcacggcctggtgccgccccacccggggccgctgctggcggtgggtgtgttcggcgccgatatcggcaagaccatcttctacggcctcatcgtcggcctgcccgcggccgccatcgccggccccatgttcggctcgttcatttcgcggcgcatcccgggccatccgtctccggagctggtcgcccagttcgttcaggacgagcgcgcccacaccctgcccggcttcggcgtcaccctcgccaccatcctgctgccggtggtgctgatgctgctgaaggcgttcgccgatgtcgccttcgccgccggccatccggtgcgggcgtggctggacctcatcggccaccccatcaccgcgctgctcgcggcgctgctgctgtcgctctacaccttcggcagcgcgcgcggcttctcgcgcgaggtcatcggcaagcacctcaacgacagcctcctgccggtggcgggcatcatcctgatcgtcggcgccggcggcggcttcaagcagatgctggtggcgagcggcgtgggcgatgtcattggccatatggcggtgcaggcccatgtgaaccccatcctcctcgcctggctggtggcggcggtgatccgggtggccacgggctccgccacggtggcgaccatcaccggggccggcatcgtagccccggtcctcgccctgacgccgggcgtcaaccgtgagctgctggtgctggccaccggcgccggctcggtggtgctctcccacgtcaacgacgccggcttctggctggtgaagcagtatttcaacatgacggtggaggagaccttcaagacctggaccgccatggagacgatcctgtcggtggtggccctgggcctgatcatgctgctttcgctggtggtgtag

SEQ ID NO: 10105 - protein, 450 aa, Xanthobacter autotrophicus Py2
MLGMSKDTFLLVDAAVTIIGLIVLITRFKVHPFVALILAAGFLGLSSGMPVDLIMKSFQDGFGGVLGFVGIVLGLGTMLGKLMAESGGADQIAQTLINAFGKQRVHWAIMLAAFLVGIPLFFEIGFVLLIPLVFVMASRTGVSLVKVGISLLAGLSAVHGLVPPHPGPLLAVGVFGADIGKTIFYGLIVGLPAAAIAGPMFGSFISRRIPGHPSPELVAQFVQDERAHTLPGFGVTLATILLPVVLMLLKAFADVAFAAGHPVRAWLDLIGHPITALLAALLLSLYTFGSARGFSREVIGKHLNDSLLPVAGIILIVGAGGGFKQMLVASGVGDVIGHMAVQAHVNPILLAWLVAAVIRVATGSATVATITGAGIVAPVLALTPGVNRELLVLATGAGSVVLSHVNDAGFWLVKQYFNMTVEETFKTWTAMETILSVVALGLIMLLSLVV

SEQ ID NO: 10106 - DNA, 1371 bp, Bacillus halodurans C-125
  CDS (1)..(1371): transl_table=11
atggaagtttcaggagctcaaatgattttaggtcttgtcattgccattatggttttaatttttctagtcatcaaaacgaaagtgcatgtctttttagccctgatcatcgcggcttcaataaccggtctagtcggagggatggcaccgcctgatgttgtaagcgccatcacagaaggatttggaagcacgctcgggtctgtggcgatcattatcggtttcggtgtaatgatgggacgaatattagaagtatctggagcggccgaacgactagcttatacggtcgtcaaagtgttaggaaagcgcaaagaggagtgggcgatggctgttacgggctatatcgtatcgattcctatatttgtagattctgcctttattatattaagtacattagcgaaagcgctatcaaagaaaacagggaagtccattgttacgctcgccattgcccttgctggtggagcggtcgttatgcaccatgctgtaccaccgacacctgggccgctaggggttgcaggaatttttggtgtggacgttggcttaatgatcttatcggggttgatctttgggattccgattatcattgttaccgttttatatgcaaaatggatcgggaaaaaaatctatcagcttcccgatgatgacggcttaggatggattagaccagagcaagaggtgaacgtcgaggattggcttgaagagaaagaaaacaaagagctaccatcgttgcttcgctccgctgcaccgatcgtcgtaccgattctcttaattttcatgaatacgacggtaacggccatcggattagaaggaacgctcgtagagtacgttcaatttttcggttcccccgtgatcgctgttgggattgcagtcctccttgccatctatggattattcaaccacgtgaagcgctcggaagctcttgatcgaatggaggaagggattcagacagctgggataatcttgttagttacaggagcaggtggagcccttggttatgtgctacgccaaacaggagctggagattatatagccgaacttgtagttgatacaggaattcctgcgattttgcttccgtttgtgatcgcttcgctcgtccgcttgattcaaggaagcgggacggttgccatgataacggctgcgtcaatttctgcgccaatcttaacagggatggatgtgaaccttgtcctagccgcgcaagcagcggccctcggagcgatggtgttttcctacttcaatgatagtctgttttgggtcgtgaaccgcacgattgggattaaagacccgaaagagcaaatgctcgtttggtctgtcccaacaacgctcagctggttaacggcactcgtttgcttacttatcgccaatctcattttcggataa

SEQ ID NO: 10107 - protein, 456 aa, Bacillus halodurans C-125
MEVSGAQMILGLVIAIMVLIFLVIKTKVHVFLALIIAASITGLVGGMAPPDVVSAITEGFGSTLGSVAIIIGFGVMMGRILEVSGAAERLAYTVVKVLGKRKEEWAMAVTGYIVSIPIFVDSAFIILSTLAKALSKKTGKSIVTLAIALAGGAVVMHHAVPPTPGPLGVAGIFGVDVGLMILSGLIFGIPIIIVTVLYAKWIGKKIYQLPDDDGLGWIRPEQEVNVEDWLEEKENKELPSLLRSAAPIVVPILLIFMNTTVTAIGLEGTLVEYVQFFGSPVIAVGIAVLLAIYGLFNHVKRSEALDRMEEGIQTAGIILLVTGAGGALGYVLRQTGAGDYIAELVVDTGIPAILLPFVIASLVRLIQGSGTVAMITAASISAPILTGMDVNLVLAAQAAALGAMVFSYFNDSLFWVVNRTIGIKDPKEQMLVWSVPTTLSWLTALVCLLIANLIFG

SEQ ID NO: 10108 - DNA, 1350 bp, Pasteurella multocida subsp. multocida str. Pm70
  CDS (1)..(1350): transl_table=11
atgttaattttgattatgatcatcgcagtcttagtcttattgctgctgattatgaaattccgcgtgcatgcgttcgttgcactaattatcgtcagtttactgaccgcacttgcgacaggcgttccagttaataaaattctgcctacgctattgactggctttggtaatacccttgctgcggttgcattactcgttggtttaggcgctatgattgggcgattactcgaaattacaggcggcgccaaagtcttggcagatacgctcattaacaaattcggcgagaaaaaagcgccttttgccttaggggtcgcgtccttactgtttggtttcccaattttctttgatgcgggtttagtggtgatgttaccaatcattttcagtgtagctaaacaatttggtggctcaacattacgctatgccttaccttctgcgggtgcctttgccgtcatgcatgctttccttccgcctcatccgggtccagttgcatcgggtgatttattaggcgctaatatgggtttactcgtgattgttggtttaatttgcgcgattccaacatggtatatcgctgcttatttattcggtttatattccggtaagaaaatcaacttagcactgcctaaagcctttttatcaggtaatgctattcatgaaacggctgctcaaaatccaccgagtttcaaaaaagtgctatttattcttctgttacctatctgtttaattctatttgacacaggtttaaatacattaagtgttgccaaagtgattgatggctcacaagtgtgggtcgaaagcttacgcttattaggcaaaacccctatcgcactccttattactttgattgttgccatcattttattaaaagaacaacgtagctatgaacaaattgaaaaaatttgtgataacgctttaggcccaatttgtgccattgtcttggttaccggtgctggtgggatgtttggcggtgtattacgcgcgagcggcattggtaacgaattatccgcaatgctgtctgatacaggtttacctgttattgttgctgcatttattattgcacttgccttacgtgttgcccaaggttcagccactgttgccttaaccaccgcctctgcgctcattgcaccaactgttgctgcaacaactggactcagtcaactcgatttatgctttattgtgattgccattgcctctggtgcaacagctttatcacacgtcaatgactcaggtttctggcttgtgagccgtttcttagaaatggatgaaaaaaccacattaaaaacctggaccgtgatggaaaccttaattggtcttgttggtttcgctctggctgttattggtagtattctcttttaa

SEQ ID NO: 10109 - protein, 449 aa, Pasteurella multocida subsp. multocida str. Pm70
MLILIMIIAVLVLLLLIMKFRVHAFVALIIVSLLTALATGVPVNKILPTLLTGFGNTLAAVALLVGLGAMIGRLLEITGGAKVLADTLINKFGEKKAPFALGVASLLFGFPIFFDAGLVVMLPIIFSVAKQFGGSTLRYALPSAGAFAVMHAFLPPHPGPVASGDLLGANMGLLVIVGLICAIPTWYIAAYLFGLYSGKKINLALPKAFLSGNAIHETAAQNPPSFKKVLFILLLPICLILFDTGLNTLSVAKVIDGSQVWVESLRLLGKTPIALLITLIVAIILLKEQRSYEQIEKICDNALGPICAIVLVTGAGGMFGGVLRASGIGNELSAMLSDTGLPVIVAAFIIALALRVAQGSATVALTTASALIAPTVAATTGLSQLDLCFIVIAIASGATALSHVNDSGFWLVSRFLEMDEKTTLKTWTVMETLIGLVGFALAVIGSILF

SEQ ID NO: 10110 - DNA, 1317 bp, Escherichia coli O157:H7 EDL933
  CDS (1)..(1317): transl_table=11
  misc_feature (622)..(622): y is t or c
atgccattagtcattgttgctatcggtgtaatcttgttattactcctgatgatccgcttcaaaatgaacggcttcatcgctctcgtcctcgtggcgcttgcggttggattaatgcaagggatgccgctggataaagttattggctccatcaaagccggtgtcggcgggacgctcggtagccttgccctgatcatgggttttggcgcaatgctgggcaaaatgctggcagactgcggtggcgcacaacgtatcgccaccacgctgattgccaaatttggtaaaaaacacatccagtgggcggtggtactgaccggttttaccgttggttttgccctgttctatgaagtgggctttgtgctgatgctgccgctggtgtttaccatcgcggcttctgcgaatattccactgctgtatgttggtgtaccaatggcagctgcactgtctgtgacccacggcttcctgccaccgcatccgggtccgactgcgattgccaccattttcaatgccgatatgggtaaaaccctgctgtacggtactattctggcaatcccgaccgtgattctcgccggtccggtttacgctcgcgtgttgaaaggtatcgataagccaattccggaaggtytctacagcgcgaaaaccttcagcgaagaagagatgccgagctttggcgtcagcgtctggacctctctggtgccggtagtactgatggcgatgcgtgcgattgccgaaatgatcctgccgaaaggtcacgctttcctgccggtagcggagttcctcggtgacccggtaatggctacgctgattgccgtgctgattgcgatgttcacctttggtctgaaccgtggtcgttcaatggatcagattaacgacacgctggtttcttccatcaaaatcattgcgatgatgctgttgatcatcggtggtggcggtgcgttcaagcaggtgctggtagacagcggcgtggacaaatacattgcttccatgatgcacgaaaccaacatttctccgctgctgatggcctggtcgattgctgccgtactgcgtatcgcgctgggttccgcaaccgttgcggcaatcactgcgggtggtatcgcggcaccgctgattgcaacgacgggtgttagcccggagctgatggttattgcggtgggttccggtagtgtgattttctctcatgtgaacgatccgggcttctggctgttcaaagagtactttaacctgactatcggcgagaccatcaaatcctggtcgatgctggaaaccattatctcggtgtgcggtctggtaggctgtctgctgctgaatatggtgatttga

SEQ ID NO: 10111 - protein, 438 aa, Escherichia coli O157:H7 EDL933
  misc_feature (208)..(208): The Xaa at location 208 stands for Leu, or Phe.
MPLVIVAIGVILLLLLMIRFKMNGFIALVLVALAVGLMQGMPLDKVIGSIKAGVGGTLGSLALIMGFGAMLGKMLADCGGAQRIATTLIAKFGKKHIQWAVVLTGFTVGFALFYEVGFVLMLPLVFTIAASANIPLLYVGVPMAAALSVTHGFLPPHPGPTAIATIFNADMGKTLLYGTILAIPTVILAGPVYARVLKGIDKPIPEGXYSAKTFSEEEMPSFGVSVWTSLVPVVLMAMRAIAEMILPKGHAFLPVAEFLGDPVMATLIAVLIAMFTFGLNRGRSMDQINDTLVSSIKIIAMMLLIIGGGGAFKQVLVDSGVDKYIASMMHETNISPLLMAWSIAAVLRIALGSATVAAITAGGIAAPLIATTGVSPELMVIAVGSGSVIFSHVNDPGFWLFKEYFNLTIGETIKSWSMLETIISVCGLVGCLLLNMVI

SEQ ID NO: 10112 - DNA, 1317 bp, Clostridium acetobutylicum ATCC 824
  CDS (1)..(1317): transl_table=11
atgccattattaattgttgttattggcgtcgcattactattactacttatgattaaattcaaagtaaacggattcatatccctaattcttgtagctttggttgttggtatcgccgaaggtatgaatcctgcaaaagctgtttcttcaattcaaaacggtgttggaagcaccttaagcagtttggcactaattttaggttttggtgctatgtttggaaaattaatagctgattctggtgctgctcaaaggatttctagaagtttaattaataaatttggtgtaaaaaaaattcaatgggctgttgtattaacgggtttcatagttggcattgctatgttctatgaggtaggttttgttctacttatacctcttgtttttactattgctgaattcacagaacttcctcttttatacataggcgttcctatggctgcagctttatctgtcactcacggatttttacctcctcaccctggacctgttgcaatagctacaatatatggtgcaagcattagcatgactcttgtatatggaattgtaatagctatacctacagtaatagttgcaggacctgttttgactaagtttttaaaacgttttgatcataaatcttcaaaaaacctttttaaaactaaggtctttgatgaagatgaaatgccaagtttctcattaagcgtattaactgctattgttcctcctattcttatggccttttcagctgtttgtgaaatcacactaccaaaaacatctcctataagacattttgcagaattcgttggaagtcctatgatggcaatgtttatatcaatcattgtagctatctttactcttggtataatgcgcggaaagaaaatggaagaaataatgagaactttagctgaagccgcaagttccattgcaatgatccttttaatagtagctggaggtggtgccttcaagcaagtactaatagacagtggtgttggaaaatatatcgcttctattatggttggaagtaatatatctcctctaatcttggcttgggcgattgcagcaattttaagattatctcttggttctgccactgtttctgctatgactactgccggtatagtacttcctcttattccttcaacccatgcaaacccagcattaatggttttagcaactggcgcaggtagtcttattttctctcatgtaaacgatccaggtttctggatgttcaaagaatattttggacttagcataggagaaacaatggcttcatggtctactttagaaactataatttcaattatggggttaattggtgttttagctttaaatatggttggatag

SEQ ID NO: 10113 - protein, 438 aa, Clostridium acetobutylicum ATCC 824
MPLLIVVIGVALLLLLMIKFKVNGFISLILVALVVGIAEGMNPAKAVSSIQNGVGSTLSSLALILGFGAMFGKLIADSGAAQRISRSLINKFGVKKIQWAVVLTGFIVGIAMFYEVGFVLLIPLVFTIAEFTELPLLYIGVPMAAALSVTHGFLPPHPGPVAIATIYGASISMTLVYGIVIAIPTVIVAGPVLTKFLKRFDHKSSKNLFKTKVFDEDEMPSFSLSVLTAIVPPILMAFSAVCEITLPKTSPIRHFAEFVGSPMMAMFISIIVAIFTLGIMRGKKMEEIMRTLAEAASSIAMILLIVAGGGAFKQVLIDSGVGKYIASIMVGSNISPLILAWAIAAILRLSLGSATVSAMTTAGIVLPLIPSTHANPALMVLATGAGSLIFSHVNDPGFWMFKEYFGLSIGETMASWSTLETIISIMGLIGVLALNMVG

SEQ ID NO: 10114 - DNA, 1338 bp, Salmonella enterica subsp. enterica serovar Typhi str. CT18
  CDS (1)..(1338): transl_table=11
atgcacgctcaaatctgggtagtgagcacgctgctgatcagcatcgtgttaatcgtattgaccatcgtgaagtttaaattccaccccttcctggcgttactgctcgccagtttctttgtcggcgcgatgatgggcatagggccgctggagatggtcacggcgatagaaaacggaataggcggtacgctcggttttctggccgccgttatcggtcttggcaccatcctcggcaaaatgatggaggtttccggcgcggcggaacgcatcgggcttacgctccagcgctgccgctggctctctgctgacgtgatcatggtactggtggggctgatttgcggaatcacgttgttcgtggaagtgggcgtcgtgttgctcatcccactggcgttttctatcgctaaaaagacccatacctcgctgctgaagctggccattccgctgtgtaccgcgctgatggccgtccattgcgtggtaccgccgcatccggctgcgctgtttgtcgcaaataaactgggggcggatatcggctcggtgattgtctacggtctgctggtcggactgatggcctcattggtcggcggcccgctgttcttaaagtttctgggtaatcgtctgccgttcaagcccgtaccgacagagtttgcggatcttgaagtgcgtgccgaaaacaccctgccgtcgctgggcgcaacgctgtttaccgttctgctgccgattggcctgatgctggtgaaaaccgtcgctgaactgaatatggcgaaagacggcacgttgtatacgctgctggagtttatcggtaatccgatcaccgcgatgtttatcgctgtctttgtggcgtattacatactcggtctgcgccagcatatgggtatgagcgcgctacttacccacaccgaaaacggctttggcgccattgcgaacatcctgctgattatcggcgcgggcggcgcgttcaacgccattctcaaaagtagcggactggcggacacgctggcggtgatcctctcaaatatgcatatgcacccgattctgctggcatggctggtagcgctgattctgcacgcggcggtcggctctgcgacggtggcgatgatgggcgccaccgcgattgttgcgcccatgctgccgctctatcctgacgttagcccggagatcatcgctattgccatcggttccggcaccattggctgcacgatcgtgaccgattccctgttctggctggtcaagcagtattgcggcgctacgctgaatgaaacgtttaaatactatacgacggccacgtttatcgcatctgtcgttgcactggctggcacattcctgctttcctttatcatctga

SEQ ID NO: 10115 - protein, 445 aa, Salmonella enterica subsp. enterica serovar Typhi str. CT18
MHAQIWVVSTLLISIVLIVLTIVKFKFHPFLALLLASFFVGAMMGIGPLEMVTAIENGIGGTLGFLAAVIGLGTILGKMMEVSGAAERIGLTLQRCRWLSADVIMVLVGLICGITLFVEVGVVLLIPLAFSIAKKTHTSLLKLAIPLCTALMAVHCVVPPHPAALFVANKLGADIGSVIVYGLLVGLMASLVGGPLFLKFLGNRLPFKPVPTEFADLEVRAENTLPSLGATLFTVLLPIGLMLVKTVAELNMAKDGTLYTLLEFIGNPITAMFIAVFVAYYILGLRQHMGMSALLTHTENGFGAIANILLIIGAGGAFNAILKSSGLADTLAVILSNMHMHPILLAWLVALILHAAVGSATVAMMGATAIVAPMLPLYPDVSPEIIAIAIGSGTIGCTIVTDSLFWLVKQYCGATLNETFKYYTTATFIASVVALAGTFLLSFII

SEQ ID NO: 10116 - DNA, 1497 bp, Salmonella typhimurium LT2
  CDS (1)..(1497): transl_table=11
atgacaagtttaccgaccccaattatcggtctgatcgttgccgttttcgtgctggtatggctggtgttacgcacccgtgttcatgcgctgatcgcgatgctggcggcggcctgtattgccggtctgttggggggaatgggcattgataaaacgctctctgtcatcaccagcggattcggtacgacgctgggcagcattggcctggtgattggtctcggcgtaatgatggggcgcttgctggaggtttccggcgcggcggagcgtatcgcctggagctttatcaaatggctggggaaacgccgtgaagagtgggcgctggcgatcacgggttatattgtcagcatccccattttcgtcgattccgcttttgtcattctttatccggtggcgaaagcgctggcgaaaagcggtaagcgttcgctactgacgctgggcgtcgcgctggcgggcgggctggtggtcactcaccatacggtacctccgacgcccggtccgctgggggtagccgggatttttaacgtcgacatcggcgcaatgttattgaccgggatggcgctggcggtgccctgtgtgatcggcattgtgttctatgcgcagtggctggataaacgctaccctgatttcgtgccgcgcacgctgaacgccgatgaagtcaatgccgcgctggagcagtacaataaagagaaagagcaaaaggaactgccgagcctgacgctttctctgctgcctattgtggtgccgatcgtgctgatcttcctgaaggctatctgttccaccctcgccactgtagaaggatggtccggcctggcgacgcatccggtggtacaggcaatcaactttgtgggaagtccggtgatcgcgttggccatcagcgttctgctggcggtgtatacgctggtgccgcgcatggataaacataccaccgcagagcgtctggaagagggcttgcaaagcgccgggattatcttactggtcacgggcgctggcggcgcgttgggcgcgatcctgcgcgacagcggcgcggggcaacagctggcggagcaggttgccaacctgccgatctcgccgatcctgatcccgtttatcgtggcgacgttggtacgcctgattcagggatcggggacggtggcgatgatcactgccgcctcgatttccgcgccgatcctggcgcagatccccggcatcaatatgttgcttgccgctcaggccgcaacgatggggtcgctgttcttcggctacttcaacgatagcctgttctgggtggttaaccgcatgatgggtgtctctgatgtcaaacagcagatggtggtttggtctgtaccgacgaccattgcctgggcgattggcggcaccggcgtggtgctgattaacctgctgttcggttccggcggtagttggctcgatccgttactgccgattgttgttctggcggcaattatgctgtgggtgcgttggcaggcgcaggggatcaaagacaagctggtagttaaggattaa

SEQ ID NO: 10117 - protein, 498 aa, Salmonella typhimurium LT2
MTSLPTPIIGLIVAVFVLVWLVLRTRVHALIAMLAAACIAGLLGGMGIDKTLSVITSGFGTTLGSIGLVIGLGVMMGRLLEVSGAAERIAWSFIKWLGKRREEWALAITGYIVSIPIFVDSAFVILYPVAKALAKSGKRSLLTLGVALAGGLVVTHHTVPPTPGPLGVAGIFNVDIGAMLLTGMALAVPCVIGIVFYAQWLDKRYPDFVPRTLNADEVNAALEQYNKEKEQKELPSLTLSLLPIVVPIVLIFLKAICSTLATVEGWSGLATHPVVQAINFVGSPVIALAISVLLAVYTLVPRMDKHTTAERLEEGLQSAGIILLVTGAGGALGAILRDSGAGQQLAEQVANLPISPILIPFIVATLVRLIQGSGTVAMITAASISAPILAQIPGINMLLAAQAATMGSLFFGYFNDSLFWVVNRMMGVSDVKQQMVVWSVPTTIAWAIGGTGVVLINLLFGSGGSWLDPLLPIVVLAAIMLWVRWQAQGIKDKLVVKD

SEQ ID NO: 10118 - DNA, 1317 bp, Salmonella typhimurium LT2
  CDS (1)..(1317): transl_table=11
atgccattagtcatcgttgctatcggtgttatcttgttacttcttctgatgatccgcttcaaaatgaacggatttatcgcccttgtcctggtagcgctcgctgtcgggttgatgcagggaatgcctctggataaagtcatcggctccatcaaagccggtgtcggtggtacgcttggcagtctggccctgattatggggttcggcgccatgctgggcaaaatgcttgccgactgcggcggcgctcaacgtatcgccactaccctgatcgcgaaatttggtaaaaagcatattcagtgggccgtagtgttaaccggctttaccgtcggcttcgctctgttctatgaagtgggcttcgttctgatgctgccgctggtattcaccattgccgcagcggcgaatatcccgctactgtacgtcggcgtgccgatggccgcggcgctctccgtcacacacggcttcctgccgccgcacccgggtccaaccgcaatcgccacgattttccatgccgatatgggtaagacgctgctgtttggtacgattctggcgatcccgaccgtgatccttgccggaccggtttacgcccgtttcctgaaaggcatcgataagccgatcccagaaggcctgtacagcgcgaaaacttttacggaagaagagatgccgggctttggcgtcagcgtctggacgtcgctggttccggttattctgatggcgatgcgtgcgattgccgagatgattctgccaaaaggccacgctttcctgcccgttgccgagttcctgggcgacccggtaatggctacgttaattgccgtactgattgcgatgttcacctttggcctgaaccgcgggcgttccatggatcagattaacgatacgctggtctcttccatcaaaattatcgccatgatgctgctgatcatcggcggcggcggcgcattcaagcaggtgctggtcgatagcggcgtggataaatacatcgcttcaatgatgcatgaaaccaatgtctctccgctgttgatggcgtggtctatcgcggcggttctgcgtatcgcgctgggctctgcgactgtcgcggcgattaccgcaggcggcattgcggcgccgctgatcgccactaccggcgttagccctgaactgatggttatcgcggtcggttccgggagcgtgattttctctcacgtcaacgacccgggcttctggctgttcaaagagtatttcaatttgactatcggcgagaccattaaatcctggtcgatgctggaaacgatcatctccgtctgcggcctgatcggctgtctgctgttgggtatggtggtttaa

SEQ ID NO: 10119 - protein, 438 aa, Salmonella typhimurium LT2
MPLVIVAIGVILLLLLMIRFKMNGFIALVLVALAVGLMQGMPLDKVIGSIKAGVGGTLGSLALIMGFGAMLGKMLADCGGAQRIATTLIAKFGKKHIQWAVVLTGFTVGFALFYEVGFVLMLPLVFTIAAAANIPLLYVGVPMAAALSVTHGFLPPHPGPTAIATIFHADMGKTLLFGTILAIPTVILAGPVYARFLKGIDKPIPEGLYSAKTFTEEEMPGFGVSVWTSLVPVILMAMRAIAEMILPKGHAFLPVAEFLGDPVMATLIAVLIAMFTFGLNRGRSMDQINDTLVSSIKIIAMMLLIIGGGGAFKQVLVDSGVDKYIASMMHETNVSPLLMAWSIAAVLRIALGSATVAAITAGGIAAPLIATTGVSPELMVIAVGSGSVIFSHVNDPGFWLFKEYFNLTIGETIKSWSMLETIISVCGLIGCLLLGMVV

SEQ ID NO: 10120 - DNA, 1341 bp, Salmonella typhimurium LT2
  CDS (1)..(1341): transl_table=11
gtgagtacattaacactggttttaaccgccgtcggttccgtcttactgctgctgtttttggtgatgaaggcgcgtatgcacgccttcgtcgcgttaatggtcgtctcgatgggcgcggggcttttttcagggatgccgcttgataaaatcgccgcgaccatggaaaaagggatgggcggcacgctgggattcctggcgattgtggtcgcgctgggggcgatgttcggcaagattctgcacgagaccggcgcggtcgatcagattgccgtcaagatgctgaaatctttcggtcatagccgcgcgcattatgccattggcctggccggtctgatttgcgcgctaccgctgttctttgaagtggcgattgtgctgctgataagcgtggcgttctcaatggcgcgccacaccggaacgaacctggtgaagctggtcattccgctgtttgcgggcgtggcggctgccgcagcgttcctgctgccgggacctgcgccgatgctgctggcatcccaaatgcacgctgactttggctggatgatcctgattggcctgtgcgcagccattccgggcatgattatcgccgggccgctgtggggcaatttcatcagccgttacgttgaactgcatgtaccggaagacattaccgagccgcatctgggcgaaggcaaaatgccttctttcggcttcagcctgtcgctgatcctgctgccgttggtgctggtagggctgaaaacgatcgccgcgcgttttgtgccggaaggttccaccgcttacgaatggtttgagtttatcggtcaccccttcactgcgattctggtcgcttgtctggtagcgatttatggcctggcgatgcgtcaggggatgccgaaagacaaagtgatggaaatctgtggccacgcgctgcaaccggcgggcattatcctgctggtgattggcgcaggcggggtgttcaaacaggtactggttgactccggcgtcggcccggcgctgggcgaagcgttaaccggtatgggactgccgattgccattacctgctttgtgctggcggcggcagtgcgcatcattcagggttccgcgaccgtggcgtgtttaaccgcggtcggtctggtgatgccggtcatagagcaactgaatttctccggcgcgcagatggctgcgctctctatctgtatcgccggcggttcaattgtggtttctcatgttaacgacgctggcttctggctgttcggtaaatttaccggcgcgaccgaagcgcagacgttaaaaacctggacgatgatggaaactatcctcggtacggtcggcgcgattgtcgggatgattgctttccaactgctgagctga

SEQ ID NO: 10121 - protein, 446 aa, Salmonella typhimurium LT2
MSTLTLVLTAVGSVLLLLFLVMKARMHAFVALMVVSMGAGLFSGMPLDKIAATMEKGMGGTLGFLAIVVALGAMFGKILHETGAVDQIAVKMLKSFGHSRAHYAIGLAGLICALPLFFEVAIVLLISVAFSMARHTGTNLVKLVIPLFAGVAAAAAFLLPGPAPMLLASQMHADFGWMILIGLCAAIPGMIIAGPLWGNFISRYVELHVPEDITEPHLGEGKMPSFGFSLSLILLPLVLVGLKTIAARFVPEGSTAYEWFEFIGHPFTAILVACLVAIYGLAMRQGMPKDKVMEICGHALQPAGIILLVIGAGGVFKQVLVDSGVGPALGEALTGMGLPIAITCFVLAAAVRIIQGSATVACLTAVGLVMPVIEQLNFSGAQMAALSICIAGGSIVVSHVNDAGFWLFGKFTGATEAQTLKTWTMMETILGTVGAIVGMIAFQLLS

SEQ ID NO: 10122 - DNA, 1338 bp, Salmonella typhimurium LT2
  CDS (1)..(1338): transl_table=11
atgcacgctcaaatctgggtagtgagcacgctgctgatcagcatcgtgttaatcgtattgaccatcgtgaagtttaaattccaccccttcctggcgttactgctcgccagtttctttgtcggcgcgatgatgggcatggggccgctggagatggtcacggcgatagaaaacggaataggcggtacgctcggttttctggccgccgttatcggtcttggcaccatcctcggcaaaatgatggaggtttccggcgcggcggaacgcatcgggcttacgctccagcgctgccgctggctctctgctgacgtgatcatggtactggtggggctgatttgcggtatcacgttgttcgtggaagtgggcgtcgtgttgctcatcccactggcgttttctatcgctaaaaagacccatacctcgctgctgaagctggccattccgctgtgtaccgcgctgatggccgtccattgcgtggtaccgccgcatccggctgcgctgtttgtcgcaaataaactgggggcggatatcggctcggtgattgtctacggtctactggtcgggctgatggcatcattggtcggcggtccgctgttcttaaagtttctgggtaatcgtctgccgttcaagcccgtaccgacagagtttgcggatcttgaagtgcgcgccgaaaacaccctgccgtcgctgggcgcaacgctgtttaccgttctgctgccgattggcctgatgctggtgaaaaccgtcgctgaactgaatatggcgaaagacggcacgttgtatacgctgctggagtttatcggtaatccgatcaccgcaatgtttatcgctgtctttgtggcgtattacatactcggtctgcgccagcatatgggtatgggcacactacttacccacaccgaaaacggctttggcgccattgcgaacatcctgctgattatcggcgcgggcggcgcgttcaacgccattctcaaaagtagcgggctggcggacacgctggcggtgatcctctcaaatatgcatatgcacccgattctgctggcatggctggtagcgctgattctgcacgcggcggtcggatctgcgacggtggcgatgatgggcgccaccgcgattgttgcgcccatgctgccgctctatcctgacgtcagcccggagatcattgcgattgccattggttccggcgccattggctgcacgatcgtgaccgattccctgttctggctggtcaagcagtattgcggcgctacgctgaatgaaacgtttaaatactatacgacggccacgtttatcgcatctgtcgttgcactggctggcacattcctgctttcctttatcatctga

SEQ ID NO: 10123 - protein, 445 aa, Salmonella typhimurium LT2
MHAQIWVVSTLLISIVLIVLTIVKFKFHPFLALLLASFFVGAMMGMGPLEMVTAIENGIGGTLGFLAAVIGLGTILGKMMEVSGAAERIGLTLQRCRWLSADVIMVLVGLICGITLFVEVGVVLLIPLAFSIAKKTHTSLLKLAIPLCTALMAVHCVVPPHPAALFVANKLGADIGSVIVYGLLVGLMASLVGGPLFLKFLGNRLPFKPVPTEFADLEVRAENTLPSLGATLFTVLLPIGLMLVKTVAELNMAKDGTLYTLLEFIGNPITAMFIAVFVAYYILGLRQHMGMGTLLTHTENGFGAIANILLIIGAGGAFNAILKSSGLADTLAVILSNMHMHPILLAWLVALILHAAVGSATVAMMGATAIVAPMLPLYPDVSPEIIAIAIGSGAIGCTIVTDSLFWLVKQYCGATLNETFKYYTTATFIASVVALAGTFLLSFII

SEQ ID NO: 10124 - DNA, 1320 bp, Salmonella typhimurium LT2
  CDS (1)..(1320): transl_table=11
atgccattaataattattgcggcaggcgttgcgctgctgttggttttaatgattggctttaaagttaacggctttatcgcccttgttctggttgccgccgtggtgggatttgccgaagggatgggcgcgcaagacgtcctgcactccatacaaaacggaattggcggtactctgggcggactcgccatgatcctcggttttggcgcgatgctgggaagattaatttccgataccggcgccgcgcagcgcattgcgacgacgctcattaatacgttcggcaaaaaacgcgtgcaatgggcgctggtgatcaccgggcttatcgtcggcctggcaatgttttttgaagtcggattcgtactgctgttgccgctcgtttttacgattgtggcctcatcgggactgcccttgctgtatgtcggggttccaatggtcgccgccttatccgttacgcactgcttcctgccgccgcatcccggccctactgctattgcgacaatttttgaggcaaatctcggtacgaccctgctgtatgggttaatcattaccataccgaccgtgattgttgccggccctctgttttcaaaattgctggcgcgctttgagaaagcgccgcctgaaggattatttaatcctcacctattcagtgaagaggagatgccgtcattctggaacagtatttttgccgccgtgatcccggtcattctgatggccatcgcagcggtatgtgaaatcacgctgccaaaaacgaatgccgtgcgggttttcttcgaatttatcggtaatccagcagtggcgttgtttattgccattatcatcgccatttttacgctgggccgacgcaacggacgtacggttgagcaggtgatggatatcgtcggcgagtccattggcgctattgcgatgattgtttttatcatcgcgggcggcggcgcgtttaagcaagtgctggtggatagcggcgtgggtcaatatatctcgcaattaatgaccggcacctcgctatctccgttattaatgtgctggacggtagccgccgtgctgcgtattgcgctaggttccgcgaccgtggctgcgataaccacagcgggcgtcgtattgccgattattaacgtaacccacgccgatccggcgttaatggtactggcgacaggcgcgggaagcgttattgcatcacatgttaacgatcccggtttttggctgtttaaagggtattttaatcttagcgtcggggaaaccctacgcacctggaccgttatggaaacattgatttctgtcatggggttgctgggcgtactggcgctgaatgcggttctgcattaa

SEQ ID NO: 10125 - protein, 439 aa, Salmonella typhimurium LT2
MPLIIIAAGVALLLVLMIGFKVNGFIALVLVAAVVGFAEGMGAQDVLHSIQNGIGGTLGGLAMILGFGAMLGRLISDTGAAQRIATTLINTFGKKRVQWALVITGLIVGLAMFFEVGFVLLLPLVFTIVASSGLPLLYVGVPMVAALSVTHCFLPPHPGPTAIATIFEANLGTTLLYGLIITIPTVIVAGPLFSKLLARFEKAPPEGLFNPHLFSEEEMPSFWNSIFAAVIPVILMAIAAVCEITLPKTNAVRVFFEFIGNPAVALFIAIIIAIFTLGRRNGRTVEQVMDIVGESIGAIAMIVFIIAGGGAFKQVLVDSGVGQYISQLMTGTSLSPLLMCWTVAAVLRIALGSATVAAITTAGVVLPIINVTHADPALMVLATGAGSVIASHVNDPGFWLFKGYFNLSVGETLRTWTVMETLISVMGLLGVLALNAVLH

SEQ ID NO: 10126 - DNA, 1392 bp, Corynebacterium glutamicum ATCC 13032
  CDS (1)..(1392): transl_table=11
atggacacctgggaacaaacccttggaacagggccactgctaggcattgcagccggcgccattgccctcatcttggttctcgtcatcgtttttaaactccatgcttttctcaccctaatactggtttcaattgttaccgcacttgctgccggcattcccgtcaccgcagtagtggacactctccttgacggttttggtaaaacactcgcctcggtcgccctattggtaggcctgggtgccatgcttggtcgattggttgaaacatccggtggcgcaaaatctctagccgacactatggtgcgaatcttcggtgaaaaacgagcagctttcgcactcggtgtcgcatcgctgatcatgggattccctatcttcttcgatgctggcctcgtggtcatgctcccagtgatcttcgcagtagctcgacgcctcaacggctccgtccttacttttggtatccctgcagctggcgccttctctgtcatgcacgtgttcgtcccacctcacccaggcccaattgcagcctctgaattcttcggcgcacaagttggatacgtactaatcgctggcatcatcgttgcactacccacctggtatttaaccggttacctgctaggtaagttcttaggccgaaagttcccccttcccgtacccgatctactcagtggtggagcacaggaagatgatcagcctcagaacccagctaacgcagtgtcgatcattgtcattttgctcattcctatgctccttatttttggcaataccggaacatcaatggcagtttccgccggcctcctagatgcagaatccaccatggtgaaaattctaggattcctcggcgaaacaccagtggcactgctcattaccttgatcattgccctgttcttcctaggcaaccgacgtggcattaatggttctgctctagagaaaaccatcgaaggcgcactcggcccaatctgttcagtcgtattaatcactggcgccggtggcatgttcggtggagtgctacgcacgtctggaattggaggagcgcttgcagactccatggcagatctaggacttccagttatcgcaggttgtttcatcgtggcagccgtccttcgtgtcgcgcagggttctgccaccgttgcgctaaccaccgccgcagcactcatggcacctgctgttgccgctgctgactttaacgaattccagcttgctgccatcgttatttccactgccgctggttctgttattgccagccacgtcaacgactccggattctggctcgttggtcgactcatgaacgccgacgtacccaccacgctaaaaacttggaccgtaaaccaaacctgcattgcgattgtgggatttgtgatggcctatgcaatgttcggattggcatcgcttgcatag

SEQ ID NO: 10127 - protein, 463 aa, Corynebacterium glutamicum ATCC 13032
MDTWEQTLGTGPLLGIAAGAIALILVLVIVFKLHAFLTLILVSIVTALAAGIPVTAVVDTLLDGFGKTLASVALLVGLGAMLGRLVETSGGAKSLADTMVRIFGEKRAAFALGVASLIMGFPIFFDAGLVVMLPVIFAVARRLNGSVLTFGIPAAGAFSVMHVFVPPHPGPIAASEFFGAQVGYVLIAGIIVALPTWYLTGYLLGKFLGRKFPLPVPDLLSGGAQEDDQPQNPANAVSIIVILLIPMLLIFGNTGTSMAVSAGLLDAESTMVKILGFLGETPVALLITLIIALFFLGNRRGINGSALEKTIEGALGPICSVVLITGAGGMFGGVLRTSGIGGALADSMADLGLPVIAGCFIVAAVLRVAQGSATVALTTAAALMAPAVAAADFNEFQLAAIVISTAAGSVIASHVNDSGFWLVGRLMNADVPTTLKTWTVNQTCIAIVGFVMAYAMFGLASLA

SEQ ID NO: 10128 - DNA, 1359 bp, Fusobacterium nucleatum subsp. nucleatum ATCC 25586
  CDS (1)..(1359): transl_table=11
atggaacaacaaattttaattggtttattagttggtattatttgtttaatttttatgatagtaaaaactaaaattcatacttttttagctttgatagttgcaactattatagttggaattgttggaggaatagaatatcctcaaattattggtagtattacaaaaggttttggtggaaccttaggaagtattggaatcataataggttttggagttatgatgggacaactttttgaagtttctggggctgcaaaaaaaatggctctatgcttcttaaaaatttttggaaaaggtaaagaagaattagcaatggctataacaggttttctagtttctatccctatattttgtgattcaggttttgttattttaactccattgataaaagctatttctaaggaaactaaaaaatcaattgtatctttggggctagctcttgcatcaggactggtaatcactcactctcttgttccacctactcctggtccagttggtgttgctggaatctttggtgtcagtgtttcaagtattattttatatggaattataatttcaatcccaatggttttagcttgcttagtatttgcaaaatatgcaggaaataaaatttggcaaatacctactagtaatggaaaatggacaagagataaaaattatgtagatgatttaaaaacttcaagtgtttatgatgaatctaacttaccttctgcatttttatctttttctccaatcgtagttcctattattttaattttattaggaactgttacagatacaatgaaacttgagggaaagattatatcatttattcaattcataggaactcctgtaatagcagtaggaattggcttgcttattacaatttatggtttaacaagaagtttagataaacaaaaagttttagaagaagttgaaattggaataaaatcagctggaacaattattttaattactggtgctggtggagcttttggaatgttaatcagagatagtggtgtaggagatgttatcgctaaatcattagttgatacagcattaccacctattttattaccttttataattgcaactttaattcgttttattcaaggaagtggtactgttgctatgattacagcagcttctattactgctccaatcattacaaaattaaatgttaatcctgttctcgctgctcttgcagcctgtgtaggttctcttttcttctcatatttcaatgatagtttcttctgggttatcaatcgttcaataggaattacagaaggaaaagaacaattaagactttattctgttgcaagtacaattgcttgggcagtaggaattattattttattaatacttaatatatttattaaataa

SEQ ID NO: 10129 - protein, 452 aa, Fusobacterium nucleatum subsp. nucleatum ATCC 25586
MEQQILIGLLVGIICLIFMIVKTKIHTFLALIVATIIVGIVGGIEYPQIIGSITKGFGGTLGSIGIIIGFGVMMGQLFEVSGAAKKMALCFLKIFGKGKEELAMAITGFLVSIPIFCDSGFVILTPLIKAISKETKKSIVSLGLALASGLVITHSLVPPTPGPVGVAGIFGVSVSSIILYGIIISIPMVLACLVFAKYAGNKIWQIPTSNGKWTRDKNYVDDLKTSSVYDESNLPSAFLSFSPIVVPIILILLGTVTDTMKLEGKIISFIQFIGTPVIAVGIGLLITIYGLTRSLDKQKVLEEVEIGIKSAGTIILITGAGGAFGMLIRDSGVGDVIAKSLVDTALPPILLPFIIATLIRFIQGSGTVAMITAASITAPIITKLNVNPVLAALAACVGSLFFSYFNDSFFWVINRSIGITEGKEQLRLYSVASTIAWAVGIIILLILNIFIK

SEQ ID NO: 10130 - DNA, 1479 bp, Streptomyces coelicolor A3(2)
  CDS (1)..(1479): transl_table=11
atgtcctactcgtccctccgtcttgccgccgccgaggccccaccccacaccggcggtctgctcaccctgatcgacggcaccgccggtctgctgaccgtcgccgccatcggcatcgcgctgctgctcttcctcatcatcaaggtgcggcttcagcccttcgtcgcgctgctcgccgtctccatagccgtcggcctgctcgccggcctgtcggtcaccgaactcttcggcaccgtgcagaagtcggacgccgtctcgaccatcgagtccggcatgggcggcatcctcggccacgtcgccatcatcatcggcctgggcaccatgctcggcgcgatcctcgaagtcagcggcggcgcccaggtgctggcctcccgcctgctcggcctcttcggggagaagcgggccccgctcgccatgggcctcaccggtctgatcttcggcatcccggtcttcttcgacgtgggcatcttcgtcctcgcgcccatcgtctacgccgccgccaagcgctccggcaagtcgatcctgctctactgcctgccgctgctggccggcctgtccatgacccacgccttcctgccgccgcaccccggcccggtggccgccgccggactgctgaacgtcaagctcggctggatcatcctcatgggcatcgtctgcggcatccccgccgtcctcgccgcctgggtgttctccgcctggatcggccgccgcatcttcgtgcccgtgccgcaggacatggtcgaggcgtccgaggaggccaagcaggccgtcatcgaggagcagcgcaaggccggcgtcgcgccgaacgagagccccgtcgcgctcggcaccgtcctcggcatcatcggcaccccgttggtcctgatcctcgccgcgaccttctcctccatcgccctggacccgtccaccctccgctcggtgatcgagttcttcggcaacccgttcgtcgcgctgaccatcgccctgctcctcgcctactacctgctcggcatccggcgcggctggtcccgcaagtccctggagaccgtctcgacggcctcgctgaagccggtcggcaacatcctgctggtggtcggcgcgggcggggtcttcggcgccgtcctcaaggccagcggcgtcgcccaggcactctccgacaccttcaacgacgtcggcctgccggtgatcgtcctcgcctacctgatctccgtggtgctgcgggtcgcgcagggctcggcgacggtggccatcgtgacgacggcgggcatcgtggcgccgctgctggccgagggcgaccactcgcaggcgttcgtcgcgctggtcatcatggccatctcggcgggctccatcttcgcctcgcacgtcaacgacggcggcttctggatggtcgccaagtacttcggcatcagcgagcgggacacgctcaagacgtggaccgtgctggagagcgtcctgtccgtcgccgggttcgtggtggccgcggtggtgagcctgttcgtgtag

SEQ ID NO: 10131 - protein, 492 aa, Streptomyces coelicolor A3(2)
MSYSSLRLAAAEAPPHTGGLLTLIDGTAGLLTVAAIGIALLLFLIIKVRLQPFVALLAVSIAVGLLAGLSVTELFGTVQKSDAVSTIESGMGGILGHVAIIIGLGTMLGAILEVSGGAQVLASRLLGLFGEKRAPLAMGLTGLIFGIPVFFDVGIFVLAPIVYAAAKRSGKSILLYCLPLLAGLSMTHAFLPPHPGPVAAAGLLNVKLGWIILMGIVCGIPAVLAAWVFSAWIGRRIFVPVPQDMVEASEEAKQAVIEEQRKAGVAPNESPVALGTVLGIIGTPLVLILAATFSSIALDPSTLRSVIEFFGNPFVALTIALLLAYYLLGIRRGWSRKSLETVSTASLKPVGNILLVVGAGGVFGAVLKASGVAQALSDTFNDVGLPVIVLAYLISVVLRVAQGSATVAIVTTAGIVAPLLAEGDHSQAFVALVIMAISAGSIFASHVNDGGFWMVAKYFGISERDTLKTWTVLESVLSVAGFVVAAVVSLFV

SEQ ID NO: 10132 - DNA, 1347 bp, Oceanobacillus iheyensis HTE831
  CDS (1)..(1347): transl_table=11
atgccattaattattgtagcattagctgtagtattactattgctactcataatgaaatggaatttaaatacatttatttcattgattattgtatcattcctaactgccttggctttagggatgccattaggagaaattgttacatcgattgaaggtggacttggcggtacattaggtgacattgccctcatctttggttttggtgcaatattagggaaactagttgcagatgctggtggggcacagcgaattgctctgacattgattcacaaatttggagaaaaacgaatccaatgggcggtagtaattgcatcattcattattggtgtagcgttattcttcgaagtagggttagttctactaataccgattatataccaaattgcaaaagaaattaaaatacctttattatatttaggtttaccaatgacggcagcgttatccgtaacgcatggttttttaccaccacatccgggtccaacagtaattgctcagcaatacggagcaaatattggaatggtacttatttatgggattattattgcggttccaacggttattttagctgggccactatttactaaagttgctaagaaaattgttccagatgcattttcaaaagttggtaatcttggatcacttggtggggcaaaatcatttccagaagaggaaacaccgagctttgcagttagtgcattaaccgcactattccctgtaattttaatggcaattacaacagtagttgatttactgcaagatatcggtgatgtgtcggataatattctttttgaaattatgcgcatgattggacaaccaacaacagcattattgatttctttattacttgcaatctatacaatgggtattgctcgtaaaataccgatgaaacaattgatgacatctgcagaagaatctgttcgcgctataggtatgatgttacttattattggtggtggcggagccttaaaacaagtcttaattgatggcggggtcggtgactctgttgctgctttatttgatggaacgagtatgtccccaatatttcttgcttggttgattgctgcaatcttaagaattgcacttggttctgcaactgtagcagcattaacaactgtaggtatggtaatcccattaatggaaggtacagatgtaaaccttgccttaatggtgttagcaactggtgcaggtagcttgattgcgtcccacgtaaatgatacaggattctggatctttaaagaatactttaatttatccatgaaagaaaccttcgcaacatggacgttacttgaaacagtaatttcagtcgcaggtctagtgtttacactagcgttaagtttaattgtataa

SEQ ID NO: 10133 - protein, 448 aa, Oceanobacillus iheyensis HTE831
MPLIIVALAVVLLLLLIMKWNLNTFISLIIVSFLTALALGMPLGEIVTSIEGGLGGTLGDIALIFGFGAILGKLVADAGGAQRIALTLIHKFGEKRIQWAVVIASFIIGVALFFEVGLVLLIPIIYQIAKEIKIPLLYLGLPMTAALSVTHGFLPPHPGPTVIAQQYGANIGMVLIYGIIIAVPTVILAGPLFTKVAKKIVPDAFSKVGNLGSLGGAKSFPEEETPSFAVSALTALFPVILMAITTVVDLLQDIGDVSDNILFEIMRMIGQPTTALLISLLLAIYTMGIARKIPMKQLMTSAEESVRAIGMMLLIIGGGGALKQVLIDGGVGDSVAALFDGTSMSPIFLAWLIAAILRIALGSATVAALTTVGMVIPLMEGTDVNLALMVLATGAGSLIASHVNDTGFWIFKEYFNLSMKETFATWTLLETVISVAGLVFTLALSLIV

SEQ ID NO: 10134 - DNA, 1317 bp, Shigella flexneri 2a str. 301
  CDS (1)..(1317): transl_table=11
atgccattagtcattgttgctatcggtgtaatcttgttgttgctcctgatgatccgcttcaaaatgaacggcttcatcgctctcgtcctcgtggcgcttgctgttggattaatgcaaggaatgccgctggataaagttattggctccatcaaagccggtgtcggcgggacgctcggtagccttgccctgatcatgggttttggcgcaatgctgggcaaaatgctggcagactgcggtggcgcacaacgtatcgccaccacgctgattgccaaatttggtaaaaagcacatccagtgggcggtggtgttaaccggttttaccgttggttttgccctgttctatgaagtgggcttcgtgctgatgctgccgctggtgtttaccatcgcggcttccgcgaatattccattgctgtatgttggtgtaccaatggcggctgcactgtctgtgacccacggcttcctgccaccgcatccgggcccgactgcgattgccaccattttcaatgccgatatgggtaaaaccctgctgtacggtactattctggcaatcccgaccgtgattctcgccggtccggtttacgctcgcgtgttgaaaggtatcgataagccaatcccggaaggtctctacagcgcgaaaaccttcagcgaagaagagatgccgagctttggcgtcagcgtctggacctctctggtgccggttgtgctgatggcgatgcgtgcgattgccgaaatgatcctgccgaaaggtcacgctttcctgccggtagcggagttcctcggtgacccggtaatggcaacgctgattgccgtgctgattgcgatgttcacctttggtctgaaccgtggtcgttcaatggatcagattaacgacacgctggtttcttccatcaaaatcattgcgatgatgctgttgatcatcggtggtggcggtgcgttcaagcaggtgctggtagacagcggcgtggacaaatacattgcttccatgatgcacgaaaccaacatttctccgctgctgatggcctggtcgattgctgccgtactgcgtatcgcgctgggttccgcaaccgttgcggcaatcactgcgggtggtatcgcggcaccgctgattgcaacgacgggtgttagcccacagctgatggttattgcggtgggttccggtagtgtgattttctctcatgtgaacgatccgggcttctggctgttcaaagagtactttaacctgactatcggcgagaccatcaaatcctggtcgatgctggaaaccattatctcggtgtgcggtctggtaggctgtctgctgctgaatatggtgatttga

SEQ ID NO: 10135 - protein, 438 aa, Shigella flexneri 2a str. 301
MPLVIVAIGVILLLLLMIRFKMNGFIALVLVALAVGLMQGMPLDKVIGSIKAGVGGTLGSLALIMGFGAMLGKMLADCGGAQRIATTLIAKFGKKHIQWAVVLTGFTVGFALFYEVGFVLMLPLVFTIAASANIPLLYVGVPMAAALSVTHGFLPPHPGPTAIATIFNADMGKTLLYGTILAIPTVILAGPVYARVLKGIDKPIPEGLYSAKTFSEEEMPSFGVSVWTSLVPVVLMAMRAIAEMILPKGHAFLPVAEFLGDPVMATLIAVLIAMFTFGLNRGRSMDQINDTLVSSIKIIAMMLLIIGGGGAFKQVLVDSGVDKYIASMMHETNISPLLMAWSIAAVLRIALGSATVAAITAGGIAAPLIATTGVSPQLMVIAVGSGSVIFSHVNDPGFWLFKEYFNLTIGETIKSWSMLETIISVCGLVGCLLLNMVI

SEQ ID NO: 10136 - DNA, 1344 bp, Shigella flexneri 2a str. 301
  CDS (1)..(1344): transl_table=11
atgcatgtgcttaacattctctgggtggtattcggcattggcctgatgctgatactgaatttgaagttcaaaatcaattcaatggtggctttgttggtggcggcgctgtccgtcgggatgctggcaggcatggatttgatgtcgctgctgcacaccatgaaagcgggcttcggcaacacgctgggagaactggctatcatcgtggtgttcggtgcggtcatcggtaaattgatggtcgactccggcgcggctcaccagatagcacatacgctgctggcgcgtctcggtctgcgctatgtacagctgtcggtgattatcatcggccttattttcggtctggcgatgttctatgaagtggcctttatcatgttagcgccgctggttattgttattgccgccgaagctaaaattccgttcctgaaactggcgatcccggcagtagcagctgccactaccgcacattcactgttcccaccgcagccgggtccggtggcgctggtgaatgcttatggcgcggatatggggatggtttatatctatggcgtactggtgacgatcccaagtgtaatctgcgcaggtctgatcctgccgaagttcctcggcaatcttgagcgcccaacgccatcattcctgaaagcagatcaaccggtagatatgaataatctgccctctttcggcgtttcgattctggtgccgctgatcccggcgatcattatgatctctaccaccatcgccaatatctggctggtaaaagatacccctgcctgggaagtggttaactttattggttcctcgccgattgcgatgtttattgcgatggtggttgcattcgtactctttggcaccgcgcgtggtcatgacatgcagtgggtgatgaacgcttttgaaagcgcggtgaagagtattgcaatggtgattctgatcatcggtgcgggtggcgtgctgaagcagaccatcatcgacaccggcattggcgacaccatcggcatgttgatgtcccacggcaatatctcgccctacattatggcatggctgatcactgtgctaattcgtctggcgacgggtcagggtgtcgtttcggcgatgaccgccgccgggattatcagtgctgcaatccttgatccagcaaccggtcagctggttggcgtgaatccggcgctgctggtactggcgacggctgcgggttccaacaccctcacccacattaatgatgcatctttctggttgttcaaaggttactttgacctgtcagtaaaagacacgttgaaaacctggggtctgctggagctggtcaactccgtggttgggctgattattgtgctgattattagcatggtagcgtaa

SEQ ID NO: 10137 - protein, 447 aa, Shigella flexneri 2a str. 301
MHVLNILWVVFGIGLMLILNLKFKINSMVALLVAALSVGMLAGMDLMSLLHTMKAGFGNTLGELAIIVVFGAVIGKLMVDSGAAHQIAHTLLARLGLRYVQLSVIIIGLIFGLAMFYEVAFIMLAPLVIVIAAEAKIPFLKLAIPAVAAATTAHSLFPPQPGPVALVNAYGADMGMVYIYGVLVTIPSVICAGLILPKFLGNLERPTPSFLKADQPVDMNNLPSFGVSILVPLIPAIIMISTTIANIWLVKDTPAWEVVNFIGSSPIAMFIAMVVAFVLFGTARGHDMQWVMNAFESAVKSIAMVILIIGAGGVLKQTIIDTGIGDTIGMLMSHGNISPYIMAWLITVLIRLATGQGVVSAMTAAGIISAAILDPATGQLVGVNPALLVLATAAGSNTLTHINDASFWLFKGYFDLSVKDTLKTWGLLELVNSVVGLIIVLIISMVA

SEQ ID NO: 10138 - DNA, 1398 bp, Streptomyces coelicolor A3(2)
  CDS (1)..(1398): transl_table=11
gtgaccagactcagcgtcgagatgctggcagcggaccccgtcgagccgatcacctcggcgggccacgcccagctgggcatcgccgtgctcctgggcatcgccgtcatcgtcctgctcatcaccaagttcaagctgcatgccttcctgtcgctgaccatcgggtcgctggcgctcggcgcgttcgccggtgcgccgctggacaaggtcatcaccagcttcaccgccggactcggctccaccgtcgcgggcgtcggcgtcctgatcgccctcggtgcgatcctcggcaagatgctcgccgactccggcggcgccgaccagatcgtggacaccatcctggcgaaggccacgccccgttcgatgccgtggacgatggtgctgatcgcctcggtcatcggactgccgctgttcttcgaggtcggcatcgtgctgctgatcccggtcgtcctgatggtcgccaagcgcggcaactactcgctgatgcggatcggcatcccggcgctggccggtctgtccgtgatgcacggcctggtcccgccgcaccccggcccgctggtcgccatcgacgcggtggacgccaacctcggtgtgaccctggcgctgggcgtgctgatcgcgatccccaccgtgatcatcgccggtccggtcttctcgaagtacgcggcccgctgggtggacgtcccggcccccgaccgcatgatcccgcagcgcgcctccgagcggctggacaagcgtccgagcttcggcgccacgctggccacgatcctgctgccggtcgtgctgatgctgctcaaggccctggtcgacatcatcatcgacgaccccgacaacgtggtgcagcgcaccttcgacgtcatcggcaacccgctgatcgccctgctggtctcggtgatcgtcggcatcttcacgctgctgcggcccgccgggttcggcaaggaccgtctctccggcctggtcgagaaggggctggcgcccatcgccggcatcctcctgatcgtcggcgcgggcggcggcttcaagcagacgctgatcgactcgggcgtgggccagatggtcctggacatctccaaggactggtcgatcccggcgctgctgctcgcctggctgatcgcggtggtgatccggctggcgaccggttcggcgacggtggcgaccgtctcggcggccggtctggtcgcgccgctggcggccgacatgtcgaccacgcacgccgccctgctggtcctggccatcggcgccggttcgctcttcttcagtcacgtcaacgacgccggcttctggctggtgaaggagtacttcgggctgaacgtggggcagaccatcaagacctggtccgtcatggagacgatcatctcggtggtcgccggtgccctggtcctgctgttgtccctggtcatatag

SEQ ID NO: 10139 - protein, 465 aa, Streptomyces coelicolor A3(2)
MTRLSVEMLAADPVEPITSAGHAQLGIAVLLGIAVIVLLITKFKLHAFLSLTIGSLALGAFAGAPLDKVITSFTAGLGSTVAGVGVLIALGAILGKMLADSGGADQIVDTILAKATPRSMPWTMVLIASVIGLPLFFEVGIVLLIPVVLMVAKRGNYSLMRIGIPALAGLSVMHGLVPPHPGPLVAIDAVDANLGVTLALGVLIAIPTVIIAGPVFSKYAARWVDVPAPDRMIPQRASERLDKRPSFGATLATILLPVVLMLLKALVDIIIDDPDNVVQRTFDVIGNPLIALLVSVIVGIFTLLRPAGFGKDRLSGLVEKGLAPIAGILLIVGAGGGFKQTLIDSGVGQMVLDISKDWSIPALLLAWLIAVVIRLATGSATVATVSAAGLVAPLAADMSTTHAALLVLAIGAGSLFFSHVNDAGFWLVKEYFGLNVGQTIKTWSVMETIISVVAGALVLLLSLVI

SEQ ID NO: 10140 - DNA, 1386 bp, Pseudomonas putida KT2440
  CDS (1)..(1386): transl_table=11
atgactcccttagatatacagctattactgacggcattggccagtgttctggtgctggtggcgctcatcgtttcgcgcctgaaaatgcacccgctgctggccttgctggtggtgtccattggcgtgggcttcgcgacgcatatggcgccaggcagcatcgtctcccacctgctcaccggcgccggcaagacactgggcgcagtgggggtggtgattgcgctgggtgcgatgctcggcaagatcctggctgacgctggcgtcacggagcaggtcgcggatgtcatcctcaagcgcacccccgaccgcatgatcccttgggccatgatgctggttgcctttgtcattggcatccccatgtttttcgaagtcggcctggtgatcatgctgccgctgatattcagcgtggcgcgcaaactggaaagcaaggcgcgcttcaaaggctcggcgtacgtgtatgtaggtgtgccggtcatttcggcgcttgccgccatgcacggcatggtaccgccgcacccaggccccctgaccgccattgccgtgctcaagacctcggtggggcccaccatgctctatggcttccttgccgccattccggcaatgatcctgggcggcccgctgtacggcatgttcatttcaccgcgcatgaacacgcggcccgatcaggcattgctggaccagttcacactggctgaaaaagccgatggccaaccccgccccggggtaatggtcggcatgctggccgcattgctgccggccatcctgatgctggtgcatgccgtcgccgagatgctgctgcccaaaggcaatgcgctgctggagatggccagcttcctgggcaacccgctgatcgccatgctgctgggcgtgctgttcgccggcgccagcctggtgcttgcgcgcggcggcgacgccgaacagctgcgcgatgcactgggcaaaagcctcaagccgatcgcctcgatcatcatgatcattgccggtggcggtgcctttcaagagatgctgaccagcgccaaggtaggcgatgccattgtgcacctgacccagcaatctgccttccctcccctgattctggggtggctgatcgcgatgctgctctcggtgtctaccggttccgccacggtcggtatcgtaggggctgccggcttgctggcgccgctggcaggtgcagacccaagccttaacctgcctttgctggccctgtccatcggctgcggttcgctgttcttcaactatgcgaaccatgcaggcttctggatggtgaaagaatcctttggcatgaccatgggcgaagccaccaagaccatttcggtggtgcagtccatcgtggcggtggttgggctgatggtggtgttgatgttgaatgcggccatcaccataggttga

SEQ ID NO: 10141 - protein, 461 aa, Pseudomonas putida KT2440
MTPLDIQLLLTALASVLVLVALIVSRLKMHPLLALLVVSIGVGFATHMAPGSIVSHLLTGAGKTLGAVGVVIALGAMLGKILADAGVTEQVADVILKRTPDRMIPWAMMLVAFVIGIPMFFEVGLVIMLPLIFSVARKLESKARFKGSAYVYVGVPVISALAAMHGMVPPHPGPLTAIAVLKTSVGPTMLYGFLAAIPAMILGGPLYGMFISPRMNTRPDQALLDQFTLAEKADGQPRPGVMVGMLAALLPAILMLVHAVAEMLLPKGNALLEMASFLGNPLIAMLLGVLFAGASLVLARGGDAEQLRDALGKSLKPIASIIMIIAGGGAFQEMLTSAKVGDAIVHLTQQSAFPPLILGWLIAMLLSVSTGSATVGIVGAAGLLAPLAGADPSLNLPLLALSIGCGSLFFNYANHAGFWMVKESFGMTMGEATKTISVVQSIVAVVGLMVVLMLNAAITIG

SEQ ID NO: 10142 - DNA, 1353 bp, Pseudomonas putida KT2440
  CDS (1)..(1353): transl_table=11
atgttcggactggctactgataccttcctgctgctcgacgcgctggttaccatcgtcgggctgatcctgctgatcacccacttcaaggttcaccccttcgtcgccctcaccctcgcggccggcttcctgggcctgacttccggcatgccggtggccaaggtcatgaaatcgttccaggacggttttggcggcgtactcggcttcgtcggtatcgtgctcgccctgggcaccatgctcggcaagctgatggccgactccggtggtgccgaccagatcgcgcaaaccctcatccgcgccttcggcaagaagaacgtgcattgggcgatgatgttcgccgccttcctggtgggcatcccgctgttcttcgaaatcggctttgtgctgctgattccactggtgttcatcgtcgcccggcgctcgggcgtctcgttggtgaaaatcggcattccgctgctggccggcctgtcggtggtgcacggtctggtgccaccacacccgggccccttgctggcgatcggcattttccacgctgacattggcaagaccatcttctacggcctgatcgtcgcactgcccaccgcgatcatcgccggccctctgttcggtaacttcatttcccgctacatcccgggcaacccgtcccaggagctgatggaccagatcgccaaggactccgatcagggcaacctgccaagcttcagcattaccctggtcactgtactgctgccggtcgcgttgatgctgctgaaaacgttcgccgacgtggtgctgcctgccgagcacatcgtgcgccagtggatggacctgatcggtcacccgatcaccgccctgctcgccgccctgttactggccttctacaccttcggctcggcccgcggcttcaaccgccagcagatcatgaagatgctcgaccagagcctggcaccgactgccgccatcgtgctgatcgtcggcgctggcggtggcttcaagcaaatgctggtggataccggcgtaggcaacgtgatcgggcagatggctgtccaggcagaaatttcgccgatcatgctggcatggctggtggcggcggtgatccgcatcgcgaccggctccgccacggtcgccaccatcaccggcgcgggtatcgtggcaccggtgatcgacctcgtgccgggggtgaaccgtgagctgttggtactggccaccggtgccggctcgctgatcctgtcgcatgtgaacgatgccggtttctggctggtgaagcagtacttcaacatgaccgtggcagaaaccttcaagacctggagcatgatggagacgatcctgtccatcgtcggcatcattttcatcatgttgctgtcgctggtggtgtga

SEQ ID NO: 10143 - protein, 450 aa, Pseudomonas putida KT2440
MFGLATDTFLLLDALVTIVGLILLITHFKVHPFVALTLAAGFLGLTSGMPVAKVMKSFQDGFGGVLGFVGIVLALGTMLGKLMADSGGADQIAQTLIRAFGKKNVHWAMMFAAFLVGIPLFFEIGFVLLIPLVFIVARRSGVSLVKIGIPLLAGLSVVHGLVPPHPGPLLAIGIFHADIGKTIFYGLIVALPTAIIAGPLFGNFISRYIPGNPSQELMDQIAKDSDQGNLPSFSITLVTVLLPVALMLLKTFADVVLPAEHIVRQWMDLIGHPITALLAALLLAFYTFGSARGFNRQQIMKMLDQSLAPTAAIVLIVGAGGGFKQMLVDTGVGNVIGQMAVQAEISPIMLAWLVAAVIRIATGSATVATITGAGIVAPVIDLVPGVNRELLVLATGAGSLILSHVNDAGFWLVKQYFNMTVAETFKTWSMMETILSIVGIIFIMLLSLVV

SEQ ID NO: 10144 - DNA, 1356 bp, Lactobacillus plantarum WCFS1
  CDS (1)..(1356): transl_table=11
atgccatttgttgttcttacactcggcatcctactactattactattaattattaaattcaagctgaatacttatattgcactgattgttacggccgtcgtcgtcggaatcggactagggatgccattaactaagattgctactagtattcagaacgggattggcagtcaactgggtgagttagcactagtcttcggcttcggtgccatgctcggccgcttagtagccgatgctggtggtgcttacacgatttccacgacactattggatattttcgggcgcaaacggctacaaattgccatcgtagtcgcctcatttatcatcgggattgccctcttcttcgaagttgggatcgtcttgttgattccaatcgtctttgccattgcgatcgaagcacaagttcccgttctctatctggggattcccatgggcgccgcattatctgttactcacggattcttaccaccgcacccggcaccaactgcaattgcgacgacgctaaatgcgaacgtgggtcatgtgctactattcgggatcattattgcgattccaactgtttatatcgcaggaccgctcttttcacgctgggcgcaaaagatggttcctgacgcattcaccggtaaaccacacctgccacttagcagtaacaaacgtcaattcaaagtatctgaagcacccgggtttggactcagtgtcttaacggcgctcttccccgtgattctgatgacaatcaccaccgtctacgaattagtcgttgatcacggtgtgacacctaaaaacccgtcgacccttgaccaaatcattcgtttgattggggcacccggaattgccatgttaatttcactattattcgccctctggtcaatggggattcaccaacacaagaccaataaggccatcacggccaccatcgaagatgccactaagtcaattgccatgttattactaatcatcggtgggggtggcgccttcaaacagatcttaattgatgggggtgttggtaaggccgtggcccagttgttcagtggcagcagcatctcaccactgattcttggctggctagtcgctgtcatcttacgggtctcactcggctccgctaccgtagcggccctcacggcagccggcctagttgcgccgttaatgacgcaagctggtatcgaccccgccctgatggtaattgccatcggctctgggagtgtcgccgcttctcacgtgaacgacgctggtttctggatgttccgggaatacttcgacctgaccgtcaagcaaacgctgcttacatggacaatgttagaaacgatcatcgctgtctgcggtctcggaggcgtgttggcgctcaacgccatcttccattaa

SEQ ID NO: 10145 - protein, 451 aa, Lactobacillus plantarum WCFS1
MPFVVLTLGILLLLLLIIKFKLNTYIALIVTAVVVGIGLGMPLTKIATSIQNGIGSQLGELALVFGFGAMLGRLVADAGGAYTISTTLLDIFGRKRLQIAIVVASFIIGIALFFEVGIVLLIPIVFAIAIEAQVPVLYLGIPMGAALSVTHGFLPPHPAPTAIATTLNANVGHVLLFGIIIAIPTVYIAGPLFSRWAQKMVPDAFTGKPHLPLSSNKRQFKVSEAPGFGLSVLTALFPVILMTITTVYELVVDHGVTPKNPSTLDQIIRLIGAPGIAMLISLLFALWSMGIHQHKTNKAITATIEDATKSIAMLLLIIGGGGAFKQILIDGGVGKAVAQLFSGSSISPLILGWLVAVILRVSLGSATVAALTAAGLVAPLMTQAGIDPALMVIAIGSGSVAASHVNDAGFWMFREYFDLTVKQTLLTWTMLETIIAVCGLGGVLALNAIFH

SEQ ID NO: 10146 - DNA, 1353 bp, Pseudomonas syringae pv. tomato str. DC3000
  CDS (1)..(1353): transl_table=11
atgttcggtatgacccatgagacgttcctgctcgtcgatgcgttggtgaccatcgtcggccttgtgctactgatcaccaccttcaaggttcaccctttcgtcgcgctgacactggcggcaggctttcttggcctgacgtcgggaatgccagtagaaaaagtcatgaagtccttccaggagggcttcggcggcgtgctgggtttcgtcggtatcatccttggcctgggcaccatgctcggcaagctgatggccgattcggggggtgcggaccagattgcgcagaccctgatccgcacctttggtaaacagaaagtgcattgggcaatgatgttctccgcgtttctggtgggcatcccgctgttcttcgagatcggttttgtgctgctgatcccgctggtgttcatcgtcgcccgtcgtaccggcgtgtccatcgtcaagatcggcatcccgttgctggctggcctgtcggccgtacacggcctggttccaccgcacccgggcccgctgctggccatcggcatttttggtgctgatatcggcaagaccattttttatggcctgatcgtcgcgctgccaaccgccatcatcgcgggtcccatctacggcaactggatctccaagcgcatccccggtacgccgtcgcaggagttgatggaccagatcgccaaggagtcgagcactgaaaacctgccgggctttggcatcacgctgatcaccatcctgctgcctgtgttcctgatgctgctcaagacctttgctgacgtggtgttgccggaaaacaacatgttccgcatctggatggacctgatcggtcacccgatcactgccctgctggcagcgctgttgctggcgttctacacctttggtgcggcacgcggctttgaccgcaccaaaatcatgaaactgctggaccagagccttgcaccggttgcagccatcgtcctgatcgtcggcgcaggtggcggcttcaagcagatgctggtggccagcggtgtgggtgatgtcatcgggcacatggccgtacaggcacagatcaacccgatcatgctggcttggctggtggcggcggtgattcgcattgcgactggttcggctaccgtggcgaccattaccggtgcagggattgtggcgccagtggttggcctgattccaggcgtcaatcgcgagctgctggtgctggccacgggtgccggctcgttgatcctgtcgcacgtcaacgatgccggtttctggctggttaaacagtatttcaacatgaccgttgccgaaacgttcaagacctggacagtgatggaaaccatcctgtcggtggtcggcctgatcttcatcatgctgttgtcgatggcactttaa

SEQ ID NO: 10147 - protein, 450 aa, Pseudomonas syringae pv. tomato str. DC3000
MFGMTHETFLLVDALVTIVGLVLLITTFKVHPFVALTLAAGFLGLTSGMPVEKVMKSFQEGFGGVLGFVGIILGLGTMLGKLMADSGGADQIAQTLIRTFGKQKVHWAMMFSAFLVGIPLFFEIGFVLLIPLVFIVARRTGVSIVKIGIPLLAGLSAVHGLVPPHPGPLLAIGIFGADIGKTIFYGLIVALPTAIIAGPIYGNWISKRIPGTPSQELMDQIAKESSTENLPGFGITLITILLPVFLMLLKTFADVVLPENNMFRIWMDLIGHPITALLAALLLAFYTFGAARGFDRTKIMKLLDQSLAPVAAIVLIVGAGGGFKQMLVASGVGDVIGHMAVQAQINPIMLAWLVAAVIRIATGSATVATITGAGIVAPVVGLIPGVNRELLVLATGAGSLILSHVNDAGFWLVKQYFNMTVAETFKTWTVMETILSVVGLIFIMLLSMAL

SEQ ID NO: 10148 - DNA, 1377 bp, Vibrio parahaemolyticus RIMD 2210633
  CDS (1)..(1377): transl_table=11
atggagcaattaacccaagccccagatcctacgttcctactgacgattgcaggccttgccattgcagcgttactcgttctgatcattaaactgaaagtccatgcttttgcttcccttactatggtgagtttaggcacagcaatcgccactggcgttccttctgagaaagtcgtatcgaccatgatgggcggcttcggcggcacactggcttccgtggcattgctggttggtcttggtgcgatgatcggtaaaattcttgaagtgactggcggtgcgaaagtgctggcagacactttgattggtcgctttggtaaagagcgcgcaccatttgctttgggcgtcgcttcattactgtttggcttcccaatcttcttcgatgctggccttgtagtgatgatgccaatcatcctaagtgtggcggctcgttttggtggctcaccaattaaatacgcgttgcctgcagctggtgcttttgcggttatgcacgcgtttgttccaccacacccaggtccggttgcagcggcagaattccttggcgcaaacatcggtctgctattggtggtgggtattttggttgctattccaacttggtaccttggcgcttacctatttggtttgtacgcgggcaaaaaattcgatatcccactatctaaagccttctttaatggcgaagcaatggtggatgagcgcaacgcaccaaaatttggcacggttatgaccatccttgtgctgccagtcctgctaatctgtttggatacggtattgaacacactggcggttgcaggtttgattgatggcaaaacggcactggttgagttcctacgtatgctaggtaaaactccagtcgcgttgctgattactttgattgtctgtctggctgtgtttgccaaagactacggcatggcaaaactagaaaaattgtgtggtgagtcattggctccaatctgtggcgttatccttgtaacgggtgctggtggcatgtttggcggcgtactgcgttcaagcggcatcggtgatgcactggctgacgttcttacagacacaggtatgcctgtgattgtggcggcgtttgtgatttcaacctgtttgcgtgttgctcaaggctcggcaaccgtagcgctaaccactacggcggctcttatcgcgccagttgtggctgcatcaacaggtttgagtgaactagacctttgctttatcgtaatcgcgattgcgggtggtgcaacggtactgtctcacttcaatgactctggtttctggttggtatctcgtctgcttgagatggatgagaaaaccacattaaaaacttggacggtaatggaaacgttacttggcggtatcgcgtttattatcgtcgcaacattaagctttattctttag

SEQ ID NO: 10149 - protein, 458 aa, Vibrio parahaemolyticus RIMD 2210633
MEQLTQAPDPTFLLTIAGLAIAALLVLIIKLKVHAFASLTMVSLGTAIATGVPSEKVVSTMMGGFGGTLASVALLVGLGAMIGKILEVTGGAKVLADTLIGRFGKERAPFALGVASLLFGFPIFFDAGLVVMMPIILSVAARFGGSPIKYALPAAGAFAVMHAFVPPHPGPVAAAEFLGANIGLLLVVGILVAIPTWYLGAYLFGLYAGKKFDIPLSKAFFNGEAMVDERNAPKFGTVMTILVLPVLLICLDTVLNTLAVAGLIDGKTALVEFLRMLGKTPVALLITLIVCLAVFAKDYGMAKLEKLCGESLAPICGVILVTGAGGMFGGVLRSSGIGDALADVLTDTGMPVIVAAFVISTCLRVAQGSATVALTTTAALIAPVVAASTGLSELDLCFIVIAIAGGATVLSHFNDSGFWLVSRLLEMDEKTTLKTWTVMETLLGGIAFIIVATLSFIL

SEQ ID NO: 10150 - DNA, 1398 bp, Streptomyces avermitilis MA-4680
  CDS (1)..(1398): transl_table=11
gtgaccagactcagcgtcgagaagctggcagcggacaccgtcgaaccgatcacctcggcgggccacgctcaactcggcatcgcggtactggcgggcatcgccgtcatcgtgctgctcatcaccaagttcaagcttcacgcgttcctcgccctgaccatcggttcgctcgcgctcggcgcgttcgccggggcgccgctcgacaagaccatcgtcagcttcacggccgggctcggctcgaccgtcgccggtgtgggcgtcctgatcgcgctgggcgccatcctcggcaagctgctcgccgactccggcggcgccgaccagatcgtcgacacgatcctcgcgaaggcgggcgggcgggccatgccgtgggcgatggtgctgatcgcctccgtgatcggcctgccgctgttcttcgaggtgggcatcgtgctgctcatcccggtcgtgctgatggtcgccaagcgcggcaactactcgctgatgcggatcggcatcccggcgctcgcgggcctgtccgtgatgcacgggctgatcccgccgcaccccggcccgctggtcgcgatcgacgcggtcaaggcgaacctcggcctcacgctggcgctcggtgtcctcgtcgccatcccgacggtgatcatcgcgggcccggtgttctcgaaatacgcagcccgctgggtggacgttccggctcccgaccgcatgatccccacccgcgcttccgaggacctggacaagcgccccggcttcggcgccaccctcgccaccatgctgctgccggtcgtgctgatgctggcaaaggccctggtcgacatcatcgtcgacgaccccacgcaccaggtgcagcgcgtcttcgacgtcatcggcgcaccgctgatcgcgctgctcgcggccgtgatcgtcggtatgttcacgctgggccgcgcggccggcttcaccaaggagcgcctctcgacgaccgtcgagaagtccctcgccccgatcgcgggcatcctgctgatcgtcggcgcgggcggtggcttcaagcagacgctgatcgactccggtgtgggccagatgatcctggagatctccaaggactggtcgatcccggcgctgctgctggcctggctgatcgcggtggcgatccggctcgcgaccggttcggcgacggtcgcgaccatctccgcggccggtctcgtcgcgcccctcgcggccgacatgtcgaccgcgcacacctcgctcctcgtgctggcgatcggggcgggctcgctcttcttcagccatgtgaacgatgccgggttctggctggtcaaggagtacttcggtctgagcgtcggccagacggtcaagacctggtcgatcatggagaccatcatctcggtggtcgccggcggactggtcctgctgctgtccctcgtgatctag

SEQ ID NO: 10151 - protein, 465 aa, Streptomyces avermitilis MA-4680
MTRLSVEKLAADTVEPITSAGHAQLGIAVLAGIAVIVLLITKFKLHAFLALTIGSLALGAFAGAPLDKTIVSFTAGLGSTVAGVGVLIALGAILGKLLADSGGADQIVDTILAKAGGRAMPWAMVLIASVIGLPLFFEVGIVLLIPVVLMVAKRGNYSLMRIGIPALAGLSVMHGLIPPHPGPLVAIDAVKANLGLTLALGVLVAIPTVIIAGPVFSKYAARWVDVPAPDRMIPTRASEDLDKRPGFGATLATMLLPVVLMLAKALVDIIVDDPTHQVQRVFDVIGAPLIALLAAVIVGMFTLGRAAGFTKERLSTTVEKSLAPIAGILLIVGAGGGFKQTLIDSGVGQMILEISKDWSIPALLLAWLIAVAIRLATGSATVATISAAGLVAPLAADMSTAHTSLLVLAIGAGSLFFSHVNDAGFWLVKEYFGLSVGQTVKTWSIMETIISVVAGGLVLLLSLVI

SEQ ID NO: 10152 - DNA, 1338 bp, Photorhabdus luminescens subsp. laumondii TTO1
  CDS (1)..(1338): transl_table=11
gtggattcacaaccttgggtgattggtacgttactcacaagtattgcgttaattgtatttacgataattaaattaaaaattcacccttttcttgctctattgttagccagtttttatgtcggtgccttaatgggaatgaaccctgttgaaatggtgaacgccattcaagggggaatcggagatacgctaggttttttagccgtagtgattggtctggggaccattcttggtaagatgatggagatatccggcgcggcagagcggattggtatcacattgcaaaaatgccgatggctatcacctgatatcattatggtactgattggtttggtttgtggtattacgctgtttgttgaagtcggggtggtattgttaattccattggcattttctattgccaggaaaaccaatacatcattgctgaaattagcgatcccattatgtacagcgttgatggcggttcactgtattattcctccgcacccggctgcattatttgtgacgaataaactgggtgcggatattggctcggtgattgtttatgggttgatagttggcctgtttgccgctttggtgggggggccattatttctgaaatttctcggtagccgtctgccttttaaatcggttccggctgaattttctgaaattgcagttcgtcaagaagaggatttaccctctttaggcatgacattgtttactgtgttattgccaattgggttaatgttgactaaaacggctgctgaattaaatatggaaaaaggtaccacgttttatacggtgctggaatttattggtaatcctattacagccatgttcattgccgcgtttgttgcctattacaccttgggcattaagcaaaatatgggaatgagtacactgttgacgaagacggaagattgtttctcttctatcgccaatattttattaattatcggcgcgggcggggcatttaatagtattttaaaagtcagtggccttagtgatacgttggccgttattttgtcgagtctggatatgcacccaattcttttgtcttggttggttgccattattttgcatgcggcggttggttcagcaacggtcgcaatgatgggggcaacagcgattgtttcgcctatgttgccgttatatccagatattagccctgaaatcattacattggcgattggttctggtgctatcggctgtactattgtgacggattcactgttttggttggttaagcaatattgcggaacaacgctcagtgaaacttttaagtattatacaaccgcaacatttattgcctctgtggttgcgttggttgggacgtttcttctttctaccatcgtgtag

SEQ ID NO: 10153 - protein, 445 aa, Photorhabdus luminescens subsp. laumondii TTO1
MDSQPWVIGTLLTSIALIVFTIIKLKIHPFLALLLASFYVGALMGMNPVEMVNAIQGGIGDTLGFLAVVIGLGTILGKMMEISGAAERIGITLQKCRWLSPDIIMVLIGLVCGITLFVEVGVVLLIPLAFSIARKTNTSLLKLAIPLCTALMAVHCIIPPHPAALFVTNKLGADIGSVIVYGLIVGLFAALVGGPLFLKFLGSRLPFKSVPAEFSEIAVRQEEDLPSLGMTLFTVLLPIGLMLTKTAAELNMEKGTTFYTVLEFIGNPITAMFIAAFVAYYTLGIKQNMGMSTLLTKTEDCFSSIANILLIIGAGGAFNSILKVSGLSDTLAVILSSLDMHPILLSWLVAIILHAAVGSATVAMMGATAIVSPMLPLYPDISPEIITLAIGSGAIGCTIVTDSLFWLVKQYCGTTLSETFKYYTTATFIASVVALVGTFLLSTIV

SEQ ID NO: 10154 - DNA, 1389 bp, Corynebacterium diphtheriae NCTC 13129
  CDS (1)..(1389): transl_table=11
atggaagattgggttcccacccttagtgctggccccttattggggatcgccgccgcggcgattgcactcattttggtcctcgtcattgtgttcaagctccacgctttcctcacactgatcatcgtttccgcagctaccggactcgccgccggcatcccactggagggcatcgtgcccaccatgaccaaaggcttcggaagtacactcgcctcagttgccctcctcgtcggcctcggagcaatgctcggccggcttgtcgaaacctccggcggtgcaaaaagcctcgccgaaaccctcgtcgcccgcttcggtgaacaacgcgcccccttcgccctcggcgtagcctccctgctgatgggtttccccatcttcttcgacgccggcctgatcgtcatgctgcccgtcatcttcgccgtggcacgccgactcaacggccccgtcctggcctacggcatccccgccgccggcgcgttctccgtcatgcacatctacctgccaccgcacccagggccaatctcagctgcagaattctacagcgcagacatcggcctcgtcatgctcctcggcctaatcatcgcgatccctacctggctgatctccggcctctggctcggtaaaaccctcggccgccgctacccactgccagttcctgacatcctagccggtggcccccaagcaaccgacgtgaaaaaccccgccacaccagggcttatcgtctccctcttgttgcttcctatgctgctcatcttcggcaacaccagcatgggccttgccacctccgcaggctgggtagacaagagctcgagcctcgtgcgcgccctacaattcgtgggcagcacccccattgccttgctgatctcaaccctcgtggcgctgtacttcctcggcattcgtcgcggccagcccaaagctgacctagaaaagcttctcgacggtgccctcggacccatctgctccgtcgtattgatcaccggtgccggtggcatgttcggtggcgtactgcgcacctccggcatcggcgacgccctagccgactccatgtccgacctcggtgtccccgtcgtcctcggctgttggctcgtcgccgccatcctgcgcctcgcccaaggctcggccaccgtggcactgaccaccgccgcagcactgatggcacccgccgtcgccgccggcggctacagcgaattccaaatcgcactcatggtgctggcctccgcagccggctccgttttcgcaggccacgtcaacgactctggcttctggctcgtcggccgcctcatgggtatggacgttgccacgaccctgcgcacctggacactcaaccaagcgctcgttggagccgtgggctttgtattcgtcctcgtcttctacggagtcagctttgccttctaa

SEQ ID NO: 10155 - protein, 462 aa, Corynebacterium diphtheriae NCTC 13129
MEDWVPTLSAGPLLGIAAAAIALILVLVIVFKLHAFLTLIIVSAATGLAAGIPLEGIVPTMTKGFGSTLASVALLVGLGAMLGRLVETSGGAKSLAETLVARFGEQRAPFALGVASLLMGFPIFFDAGLIVMLPVIFAVARRLNGPVLAYGIPAAGAFSVMHIYLPPHPGPISAAEFYSADIGLVMLLGLIIAIPTWLISGLWLGKTLGRRYPLPVPDILAGGPQATDVKNPATPGLIVSLLLLPMLLIFGNTSMGLATSAGWVDKSSSLVRALQFVGSTPIALLISTLVALYFLGIRRGQPKADLEKLLDGALGPICSVVLITGAGGMFGGVLRTSGIGDALADSMSDLGVPVVLGCWLVAAILRLAQGSATVALTTAAALMAPAVAAGGYSEFQIALMVLASAAGSVFAGHVNDSGFWLVGRLMGMDVATTLRTWTLNQALVGAVGFVFVLVFYGVSFAF

SEQ ID NO: 10156 - DNA, 1350 bp, Bacillus cereus ATCC 10987
  CDS (1)..(1350): transl_table=11
atggtagttggaatcgtactagcggcagttgtcatactacttttacttattacggtagtaaaatggcatccgtttgtcgcgttaattttaacagcaattggtgtagggctagcaatgggaatgccattgattggaacttcaccaaaagatccagggattattgattctattaaactagggcttggtaatacgttagggtttttagcgatagttttagcattaggaacgatgcttggaaaaatgatggccgaatctggcggtgctgaacgaattgctaacacattaattgatcgttttgggaagaaacgtgttcactgggcaatgatgtttgttgcatttttagtagggattccggtatttttccaagttggatttgtactactaattccattggtatttacaattgcattagaaacaggggtatcacttattacaatcggtattccactagtagcaggattatccgttgtacacggactagtgccaccgcatccagcagcgatggcagcggtaggtatttttaaagcagatgtagggaagacaattttatatgcgttaattgtcggacttccaactgcaattatttcaggtccactttatggaaaatggattggtgctcgtatacataaggaagtaccattagagatagcagagcaatttgttgaaaaagataataaaaaagagcttcctagctttgggaatacattgtttacaattttacttccagtatttcttatgcttggtgcatcaatagcggaagttgcattaaataaaacgagtcaactagcacaagtattacactttattggagatccgattgtcgctttattaattgcaaccatttactctttctttagtcttggatatgcaaaaggtttctcaaaagataaagtattacaatttacaaatgattgccttgggccaattgcaaacatattgttagtgattggtgcaggcggagcatttaataaagtattattagattctggaattggaacgacaattgcagatatggcgaaagaatcgcatatttcaccaatattattagggtggggaattgcggcactaatccgaatcgcaactggatcggcaactgtttctatgatgacagcagctggtattgttgcaccgattgcagcaagtacaccaggtgtaaatgtagaattattagcacttgcaacaggtgcagggtcattaattttatcacatgtaaatgattctggattttggatgattaaagaatatttcgggatgactgtgaaagaaacattattaacatggacggcaatggagacaatattatctgttgtagcacttggactcatttcgttattaaatatatttgtatag

SEQ ID NO: 10157 - protein, 449 aa, Bacillus cereus ATCC 10987
MVVGIVLAAVVILLLLITVVKWHPFVALILTAIGVGLAMGMPLIGTSPKDPGIIDSIKLGLGNTLGFLAIVLALGTMLGKMMAESGGAERIANTLIDRFGKKRVHWAMMFVAFLVGIPVFFQVGFVLLIPLVFTIALETGVSLITIGIPLVAGLSVVHGLVPPHPAAMAAVGIFKADVGKTILYALIVGLPTAIISGPLYGKWIGARIHKEVPLEIAEQFVEKDNKKELPSFGNTLFTILLPVFLMLGASIAEVALNKTSQLAQVLHFIGDPIVALLIATIYSFFSLGYAKGFSKDKVLQFTNDCLGPIANILLVIGAGGAFNKVLLDSGIGTTIADMAKESHISPILLGWGIAALIRIATGSATVSMMTAAGIVAPIAASTPGVNVELLALATGAGSLILSHVNDSGFWMIKEYFGMTVKETLLTWTAMETILSVVALGLISLLNIFV

SEQ ID NO: 10158 - DNA, 1284 bp, Yersinia pestis biovar Microtus str. 91001
  CDS (1)..(1284): transl_table=11
atgctgctattactgatgatccgttacaaacttaacggatttatctcgctgatactggtcgcgttagcggtaggtatcatgcaagggatgccaatcgataaagttgtcggctcgatcaaagcgggtgtcggcggaacattaggtagcctggccttgattatgggcttcggggccatgctcggtaaattgctggccgattgtggcggcgctcaacgtatcgcgaccaccttgattgagaaatttggtcaaaaacatattcaatgggcggtggtactgaccggctttactgtgggttttgccctgttttatgaagtgggttttgtgctgttattgccactggtattcagcattgcggcctctgcccgcatccccttgctatatgtgggtgttcccatggcggcggcgctttctgtcactcatggttttctgccacctcacccaggcccgaccgccattgccaccattttcaacgccgatatgggcaaaacgctgctgtacggcacgttgctggcaatcccaaccgtgattttggcaggcccggtgtacgcccgctttctaaaaggaattgataagcctgttcctgaagggttgtataacccgaaaatctttaccgataaagagatgccaagctttggggtcagtgtcagtacggcgctggtaccggttattttgatggcattgcgggccgtagcagagatgattttgcctaaaggccattcgctgctcccctatgccgagttctttggtgatcctgtaattgctacgctgattgccgtgttaattgcaattttcacctttggtctaaaccggggccgctcagtggaatcggtcatggagaccctgtctgattccatcaagatcatcgcaatgatgctgttagttattggagggggcggtgctttcaagcaggttttagtcgatagcggcatagagcaatatattgctggcatgatgggcaatagcggggcatcacctattctgatggcatggtccatcgccgccttactgcgtatcgccctgggttctgcgacggtggcagcgatcaccgctgggggcattgtcgcaccgttaatcgcgaccaccggtgccagccctgagttgatggtcattgccgttggttccggtagcgtgatcttctctcacgtgaatgaccctggcttctggctattcaaggagtatttcaacctaaccattatggaaaccattaaatcgtggtcagtactggaaaccattatttcagtctgcgggttgatcggctgtttgttgctgtctctggttatttag

SEQ ID NO: 10159 - protein, 427 aa, Yersinia pestis biovar Microtus str. 91001
MLLLLMIRYKLNGFISLILVALAVGIMQGMPIDKVVGSIKAGVGGTLGSLALIMGFGAMLGKLLADCGGAQRIATTLIEKFGQKHIQWAVVLTGFTVGFALFYEVGFVLLLPLVFSIAASARIPLLYVGVPMAAALSVTHGFLPPHPGPTAIATIFNADMGKTLLYGTLLAIPTVILAGPVYARFLKGIDKPVPEGLYNPKIFTDKEMPSFGVSVSTALVPVILMALRAVAEMILPKGHSLLPYAEFFGDPVIATLIAVLIAIFTFGLNRGRSVESVMETLSDSIKIIAMMLLVIGGGGAFKQVLVDSGIEQYIAGMMGNSGASPILMAWSIAALLRIALGSATVAAITAGGIVAPLIATTGASPELMVIAVGSGSVIFSHVNDPGFWLFKEYFNLTIMETIKSWSVLETIISVCGLIGCLLLSLVI

SEQ ID NO: 10160 - DNA, 1359 bp, Staphylococcus aureus subsp. aureus MRSA252
  CDS (1)..(1359): transl_table=11
atgtttaacgaaatatggccgttaatcagtgttgttttaggtataattattttattagtattaatcattgggtttaaattaaatacatttatttcattaattatcacatcgatgattacagcgttaatgctaggtataccattgactaaaattatggagacgattgagaaagggatgggcagtacgctcggccacattgcactgatattcggtttaggtgccatacttgggaaattacttgctgatggtggtggtgcaactcgaattgcagacacgttgattcaaaaatttggtcaaaaacatgtacaatgggcaatgcttgttgcagcatttatcgtcgggattgcattgttctttgaagtaggtttagtcttactgattccattagtatttacagtagcaaaacgcgcaaatgtttcagtgttaaaactaggattacctatggtaacagctttatcagtgacacatggctttttaccaccacatccaggaccggtagtcatcgcaaaagaattaaaggcgaatgtaggagatgtattactatacggtatgattattgccattccagttacactcattgcaggacctatatttaacaaagttgcacaaaaaatgattccgtctgcgtatacacgagaaggcgatatttcagcgttaggtgcacaaaaagaatttacggatcaagagatgccaggatttggtatgagtttattaacagcaacattaccagtcatattaatgttagtgtctacgataacgcaacttgtaaccgggcacgacaaacctacaaatctatttgaatctatcatttatatgatcggaacagcagggacagccatgctaatagcagtattatttgcaatcgttacgatgggattaatgagaaaacgtaagatgaatcatattatggaatcagtgacgaatgcgatttatccaatcggaatgatgttattgattattggcggtggcggtacatttaaacaagtattaattgacggtggtgtcggaaatacaattgctaaaatgtttgaaggtacagagatgtctccgattttactagcttggattgttgcagctgtgctacgtatcgcattaggttcggctacagtagctgcgatttcaactacaggtattgtcttaccattattacaatcatcagatgtaaatgttgcattagttgtactagcgattggtgcaggtagtgtgattttgtctcatgttaatgacgcaggattctggatgtttaaagaatattttggtttaactgtaaaagaaacattcctaacatggtcattattagaaacgattatttccgtttcaggtatcatcttcattttattcatcagcttatttgtttaa

SEQ ID NO: 10161 - protein, 452 aa, Staphylococcus aureus subsp. aureus MRSA252
MFNEIWPLISVVLGIIILLVLIIGFKLNTFISLIITSMITALMLGIPLTKIMETIEKGMGSTLGHIALIFGLGAILGKLLADGGGATRIADTLIQKFGQKHVQWAMLVAAFIVGIALFFEVGLVLLIPLVFTVAKRANVSVLKLGLPMVTALSVTHGFLPPHPGPVVIAKELKANVGDVLLYGMIIAIPVTLIAGPIFNKVAQKMIPSAYTREGDISALGAQKEFTDQEMPGFGMSLLTATLPVILMLVSTITQLVTGHDKPTNLFESIIYMIGTAGTAMLIAVLFAIVTMGLMRKRKMNHIMESVTNAIYPIGMMLLIIGGGGTFKQVLIDGGVGNTIAKMFEGTEMSPILLAWIVAAVLRIALGSATVAAISTTGIVLPLLQSSDVNVALVVLAIGAGSVILSHVNDAGFWMFKEYFGLTVKETFLTWSLLETIISVSGIIFILFISLFV

SEQ ID NO: 10162 - DNA, 1338 bp, Acinetobacter sp. ADP1
  CDS (1)..(1338): transl_table=11
atgttgcttatttatactgtagtcgcgattgttgctttggtcgtgatgatcgcgaagtttagaatttatccatttctggttcttattattgtctcgcttggtttggctttagctgttgggatgccaatgggtgatatcgttaaatcatacgaagctggtactggtaaaaccttgggccatcttgcaattgtaattgcactcgggaccatgctcggaaagatgatggcagagtcgggcggggcagaacgcattgcgattaccttaattcaatggtttggagagaaaaatatccattgggccatgatgtttattggtcttgtggttgggttacctgtgttttttgaagtgggttttgtgctgctcattccaattgtatttaacattgctaaacgtacaggtaagtcattattaatcgtgggtttgccaatgctggcaggcttgtcggtagtgcatggtttaattccgccccatccagcagcgctgctcgctgtacaggcctacaatgctgatattggaacaacgattgcctacagcctcttggtgggggtgccaaccgccgttgttgcagggccgttatatgcactctggatcaataaatacgtcaaattgcctgaaaataatccattagcaaagcagtttgttgaagcagatacaaacagaaatcgtgagctacccagctttagaattactttattcacgatcatgttgcctgtggtcttgatgttggtggggagctgggcagatttattctttgcaccccaaacctttgccaatgatttgctgcgttttattggcacctctgatatcgcgttgttaattgcagtactggtgagctttgttacctttgggactatgcaaggttttacccgtgtacaaattgaaaaattctgtggtggctgcttggcttcgattgctggaatcatgctgattgtgggtgctggtggtggttttgggggtattttacgtgatagcggtatttctgatgagattgtttctacagccttaaaggccaatctatcgccgttattgctgggctggtttgttgcagcattgattcgtttggcaacaggttcggcaactgttgcgatggccacagcctgtagtattgtcgcaccgattgcggcgacagcgggcgtcgttgttagaccagaactcttggtacttgccacaggttcaggctcactggtgttttcgcatgtcaatgatgcaggcttttggctgatcaaagaatatttcggtatgacggtgggacaaacacttaaaacctggtctgtactggaaaccattatttcggtgctgggtttgtcttttacgctgctactgagcgctatcttataa

SEQ ID NO: 10163 - protein, 445 aa, Acinetobacter sp. ADP1
MLLIYTVVAIVALVVMIAKFRIYPFLVLIIVSLGLALAVGMPMGDIVKSYEAGTGKTLGHLAIVIALGTMLGKMMAESGGAERIAITLIQWFGEKNIHWAMMFIGLVVGLPVFFEVGFVLLIPIVFNIAKRTGKSLLIVGLPMLAGLSVVHGLIPPHPAALLAVQAYNADIGTTIAYSLLVGVPTAVVAGPLYALWINKYVKLPENNPLAKQFVEADTNRNRELPSFRITLFTIMLPVVLMLVGSWADLFFAPQTFANDLLRFIGTSDIALLIAVLVSFVTFGTMQGFTRVQIEKFCGGCLASIAGIMLIVGAGGGFGGILRDSGISDEIVSTALKANLSPLLLGWFVAALIRLATGSATVAMATACSIVAPIAATAGVVVRPELLVLATGSGSLVFSHVNDAGFWLIKEYFGMTVGQTLKTWSVLETIISVLGLSFTLLLSAIL

SEQ ID NO: 10164 - DNA, 1335 bp, Erwinia carotovora subsp. atroseptica SCRI1043
  CDS (1)..(1335): transl_table=11
atgccattaatcatcgtagcaattggggttgccctgctgctgctgctgatgatccgttgtaaattgaacgggttcatttcattgattctggtgtcgctggccgtcggcttggcgttgggttacaccactcaggggggatttaacgtcaatggcgtgatcacttctatcaaaaatggggttggcggcacgctgggcagcctggccctgatcatggggtttggcgccatgttgggcaaactgctagcagattgcggcggcgcccagcgtattgcgacgacgcttatcgataaatttggtaaggaccgtatccagtgggcagtggtcttaaccggttttactgtcggttttgcgctgttttatgaagttggttttgtgttgctgctgccgctggtgtttaccattgctgccgcagcgcaaattccattgctgtttatcggtgtgccgatggctgccgcgttatcggtaacccatgcgttgttgcctccgcatccgggcccgaccgctatcgctattctgttcaaagccgatatgggtaaaaccctgctttacggaaccttgattgctatccctactgtgattttggcggggccggtctatgcgcgtttcctgaaaagtatcgataaacctattcctgctggattgcacaatccaaaagtgtttgccgaccatgagatgccgagctttggtatcagcgtattcactaccctgattccggttattctgatgacgggccgtgcagtggcagaaatgacgctgcaaaaaggccacccggtgctgggttacgcggagtttttgggcgacccggttatggcgaccctgatttccgttatcgtggcgatctttaccttcgggcttaatcgcggtcgtagcatggatcaggtaatggataccgttagcgattccatcaagatcatcgccatgatgttgatggttatcggtggcggcggtgcgttcaaacaaattctggtggacggtggcgttgcgaagtatatcgaaacgctgatggcgggcagtacgctgtcgccgttactgatgggatgggcgattgccgcggcattgcgtctggctctgggctcagcgaccgttgcggccatgaccgcaggcgggattgttgcgccgttgctgaccatcactggggtgagtcctgagctgatggtgctggctgtgggttccggcagcgtgattttctctcacgtgaacgatccgggtttctggctgtttaaagagtatttcaacctgactattgtcgaaaccatgaagtcctggtctgcgttggaaaccattattgcggtgtgtggcctgattggctgtctgctgctgaatatggtgatttaa

SEQ ID NO: 10165 - protein, 444 aa, Erwinia carotovora subsp. atroseptica SCRI1043
MPLIIVAIGVALLLLLMIRCKLNGFISLILVSLAVGLALGYTTQGGFNVNGVITSIKNGVGGTLGSLALIMGFGAMLGKLLADCGGAQRIATTLIDKFGKDRIQWAVVLTGFTVGFALFYEVGFVLLLPLVFTIAAAAQIPLLFIGVPMAAALSVTHALLPPHPGPTAIAILFKADMGKTLLYGTLIAIPTVILAGPVYARFLKSIDKPIPAGLHNPKVFADHEMPSFGISVFTTLIPVILMTGRAVAEMTLQKGHPVLGYAEFLGDPVMATLISVIVAIFTFGLNRGRSMDQVMDTVSDSIKIIAMMLMVIGGGGAFKQILVDGGVAKYIETLMAGSTLSPLLMGWAIAAALRLALGSATVAAMTAGGIVAPLLTITGVSPELMVLAVGSGSVIFSHVNDPGFWLFKEYFNLTIVETMKSWSALETIIAVCGLIGCLLLNMVI

SEQ ID NO: 10166 - DNA, 1371 bp, Propionibacterium acnes KPA171202
  CDS (1)..(1371): transl_table=11
atgcccgtcatcctcgaaaccgcagccagtaccggccaactgattatggccaccctcatcggcttcgccaccatcgttgcccttataaccaagttcaaactccaccccttcctctccttgacgatcggttctttagttgtcggagctatcgcaaagctgtccctgtcggagatattggcgtcctattccaaaggagtcgggtcgacggtcgcttctgtcggagtcctcatcgccctaggagcgattatcggcaagttgttagcagattccggtggcgccgacgaaatcgtcgacaccctagtctctcaggcttctcccgccaccttgccatgggcgatggccctcattggcgctgtcattggactgcccatgttcttcgagatcggtctcgtcctgctcgttccggtcatcctgctggtaacccgccgttccaagctgcccctcatgagagtagctatcccggccctggctggcctatcgacgatgcatgcccttgttccacctcatccgggcccattggccgccattgggctgctcaaagcagacctcggcatcaccctcgggttcggtgtccttattgccataccgacggttattgctgctggcccgctgttctcgcggctcgcagctcggtgggtgcccgttgatgcgcctgacctcttccttaattctgacgagaatggccgttgcggtattgcccctggtcgcccaaggttctccgtcaccttgatgaccgtcctgctacctgtcgtcctcatgatgggcaaggccctcgccgatatcttcgctctcaaaggcaccgccgtccgcagtatcttggatttccttggcgagccgatgtttgctttgctgctgacaaccctgctggcgatctttaccctgggcaaggcttccggcatcaaccgggacgctatgaacaacagtgtgggggcagcgctgcccccaatcgctggcatcttactcatcgtcgccgccggcggtgggtttaagcagatcctcgtcgacactggtattgccaagctactaggcaacggcattacccagtcctcgatctccccgctactgatggcctggctcgtcgctgtcgtcatccggttggcgaccggctcagcgacggtggcaaccgtcaccgcggccggcatcctggaaccggtggcagccagcttgccgcccgcccatgcggcattgctggttctagcgatcggctgcggttcggttttcttctcacacgtcaatgacgccggtttctggctcatcaaggaatacttcggtatctcggtgggacaaaccattaagagttggtcgctcatggagacggcgctgtcagtctgcggagtgctcctggtgctgctggtctccgtcatcgtctga

SEQ ID NO: 10167 - protein, 456 aa, Propionibacterium acnes KPA171202
MPVILETAASTGQLIMATLIGFATIVALITKFKLHPFLSLTIGSLVVGAIAKLSLSEILASYSKGVGSTVASVGVLIALGAIIGKLLADSGGADEIVDTLVSQASPATLPWAMALIGAVIGLPMFFEIGLVLLVPVILLVTRRSKLPLMRVAIPALAGLSTMHALVPPHPGPLAAIGLLKADLGITLGFGVLIAIPTVIAAGPLFSRLAARWVPVDAPDLFLNSDENGRCGIAPGRPRFSVTLMTVLLPVVLMMGKALADIFALKGTAVRSILDFLGEPMFALLLTTLLAIFTLGKASGINRDAMNNSVGAALPPIAGILLIVAAGGGFKQILVDTGIAKLLGNGITQSSISPLLMAWLVAVVIRLATGSATVATVTAAGILEPVAASLPPAHAALLVLAIGCGSVFFSHVNDAGFWLIKEYFGISVGQTIKSWSLMETALSVCGVLLVLLVSVIV

SEQ ID NO: 10168 - DNA, 1317 bp, Yersinia pseudotuberculosis IP 32953
  CDS (1)..(1317): transl_table=11
atgccattaatcatcgtcgcggttggcgttgccatgctgctattactgatgatccgttacaaacttaacggatttatctcgctgatactggtcgcgttagcggtaggtatcatgcaagggatgccaatcgataaagttgtcggctcgatcaaagcgggtgtcggcggaacattaggtagcctggccttgattatgggcttcggggccatgctcggtaaattgctggccgattgtggcggcgctcaacgtatcgcgaccaccttaattgagaagtttggtcaaaaacatattcaatgggctgtggtactgaccggctttactgtgggttttgccctgttttatgaagtgggttttgtgctgttattgccgctggtattcagcattgcggcctctgcccgcattcccttgctatatgtgggtgttcccatggcggcggcgctttctgtcactcatggttttctgccacctcacccaggcccgacagccattgccaccattttcagcgccgatatgggcaaaacgctgctgtacggcacattgctggcaatcccaaccgtgattttggcaggcccggtctacgctcgctttctaaaaggaattgataagcctgttcctgaagggctgtataacccgaaaatctttaccgataaagagatgccaagctttggagtcagtgtcagtacggcgctggtaccggttattttgatggcattgcgggccgtagcagagatgattttgcctaaaggccattcgctgctcccctatgccgagttctttggtgatccagtaattgctacgctgattgccgtgttaattgcaattttcacctttggtctaaaccggggccgctcagtggaatcggtcatggagaccctgtctgattccatcaagatcatcgcaatgatgctgttagttattggaggcggcggtgctttcaagcaggttttagtcgatagcggcatagagcaatatattgctggcatgatgggcaatagcggggcatcgcctattctgatggcatggtccatcgccgccttactgcgtatcgccctgggttctgcgacggtagcagcgatcaccgctgggggcattgtcgcaccgttaatcgcgaccaccggtgccagccctgagttgatggtcattgccgttggttccggtagcgtgatcttctctcacgtgaatgaccctggtttctggctattcaaggagtatttcaacctaaccattatggaaaccattaaatcgtggtcagtactggaaaccattatttcagtctgcgggttgatcggctgtttgttgctgtctctggttatttag

SEQ ID NO: 10169 - protein, 438 aa, Yersinia pseudotuberculosis IP 32953
MPLIIVAVGVAMLLLLMIRYKLNGFISLILVALAVGIMQGMPIDKVVGSIKAGVGGTLGSLALIMGFGAMLGKLLADCGGAQRIATTLIEKFGQKHIQWAVVLTGFTVGFALFYEVGFVLLLPLVFSIAASARIPLLYVGVPMAAALSVTHGFLPPHPGPTAIATIFSADMGKTLLYGTLLAIPTVILAGPVYARFLKGIDKPVPEGLYNPKIFTDKEMPSFGVSVSTALVPVILMALRAVAEMILPKGHSLLPYAEFFGDPVIATLIAVLIAIFTFGLNRGRSVESVMETLSDSIKIIAMMLLVIGGGGAFKQVLVDSGIEQYIAGMMGNSGASPILMAWSIAALLRIALGSATVAAITAGGIVAPLIATTGASPELMVIAVGSGSVIFSHVNDPGFWLFKEYFNLTIMETIKSWSVLETIISVCGLIGCLLLSLVI

SEQ ID NO: 10170 - DNA, 1377 bp, Symbiobacterium thermophilum IAM 14863
  CDS (1)..(1377): transl_table=11
atggcgtcagcagtctcgggctcccagatgctcctggccctgctgatcggcatcgtcgtcctcgtcttcctgatcctgaagaccaagatccacgccttcccggccctgatcatcgccgccgccctgatcggcctcgtcggcggcatggacccggtggacgtcagctccgcgatcacgaccggattcggcaacaccctcgccagcatcggcatcgtcatcggcttcggcgtgatgatggggcgcatcctggagatctccggcgccgcggagcgcatggccaccttcttcctgaagcacctgagccgccggcgcccggagtgggccctggccatcaccggctacttcacctcgatccccatcttctgtgactccggctacgtcatcctggccccgctggccaaggcgctctcccggcagagcggcaagtccgtggtgaccctgggcatctccctggccgtgggcctcgtctccacccaccacctggtgccgccgaccccgggcccgctgggcaccgccggcatcttcggggcggacatcggcaagatgatcctctggggcatcctcttcgccgttccggtcaccatcgtcggcgtcctctacgccgtctggctgggccggaggatctaccaggtgcccgccgccgacggcgagggctgggagcgcaaggagtggaaggcggagctggagcaggccatcgagatcgtcgagcggaaggacctgcccggcaccgcgctctccttcgcgccgatcctggtgcccatcctgctgatcctgctcaacaccaccctgtctgccgtcggcgccggcggcgcctgggcccggttcctgatcttcctgggccagcccatcatcgccgtgctggtcggcctgctgatcgccatctacggcctgggcgccaagatgacccggccggaggtcttgaaggagatggagaagggcgtccagtccgcgggcatcatcatgctggtcaccggcgccggcggcgccctgggccaggtgatccgggccagcggcgcgggcgactacgtggcccaggccctggcgaacagcgccctgccggcgatcctgctgcccttcgtgatcgccaccggcctgcggctgatccagggctccggcaccaccgccatgctgaccgccgcgtccatcaccgccccgatcctggccccgctgggcatcgacccggtcttcgcggccatgtccgcctccatgggcgccttcgtcttcagctacttcaacgactccttctactgggtcgtcaaccgtttcatcggcatcgaggacgtgaaggagcagatccaggtctggtcggtgcccacgaccctggcctggctcaccccgggcatctgcctggtgatcgccaacaccctgttcggatag

SEQ ID NO: 10171 - protein, 458 aa, Symbiobacterium thermophilum IAM 14863
MASAVSGSQMLLALLIGIVVLVFLILKTKIHAFPALIIAAALIGLVGGMDPVDVSSAITTGFGNTLASIGIVIGFGVMMGRILEISGAAERMATFFLKHLSRRRPEWALAITGYFTSIPIFCDSGYVILAPLAKALSRQSGKSVVTLGISLAVGLVSTHHLVPPTPGPLGTAGIFGADIGKMILWGILFAVPVTIVGVLYAVWLGRRIYQVPAADGEGWERKEWKAELEQAIEIVERKDLPGTALSFAPILVPILLILLNTTLSAVGAGGAWARFLIFLGQPIIAVLVGLLIAIYGLGAKMTRPEVLKEMEKGVQSAGIIMLVTGAGGALGQVIRASGAGDYVAQALANSALPAILLPFVIATGLRLIQGSGTTAMLTAASITAPILAPLGIDPVFAAMSASMGAFVFSYFNDSFYWVVNRFIGIEDVKEQIQVWSVPTTLAWLTPGICLVIANTLFG

SEQ ID NO: 10172 - DNA, 1386 bp, Mannheimia succiniciproducens MBEL55E
  CDS (1)..(1386): transl_table=11
atggaaactgcagctagtatgtcgcaaatgcttatcggtttggctatcggtattgcacttctcttaatactggcaatgaagacaagaatccatgtctttgttgctttaattctcgcctcgttaaccaccggtctgataggcggtttaccttttgccgaagtgattagttcagtcactaaaggtttcggtagtacgctgggcagtaccggtattattatcggtctcggcgtcatgatgggcgcaattttagaaaaatccggcgctgccgaacaaatggctttctctattatcaaattgattggtaaagccaaggaagaatgggctttagccttaacaggctatgtggttgccattcccgtttttgccgattccggtttgattattttaaccccgcttgccagatccttatcccgtatgactggtaaaagcgttatcgggctcggtttagccatggcaaccggtctgcaattagcgcacgtatttattccgccgacaccgggtccgttagcggttgccggtattttagatatcgatatggggatgatgattatttgggggatgatattaacggttccgactttggtaatgtctacgctatacgcaaaatggctcggtaaaaaaatctatcagattcctaacgaagacggtaccgactttgaacgcaaggaatttaaagaggaatacattaaatccattgaaaatgtagaacagatttataaagataagaatctgccgggtgccggactgtcattttcacctatcgtaattcctttaattttgattttaggtaataccaccgttaatttcctgaaaatcgaaaatggttttgccgatttgttaaaaatagtaggccatccaattattgcattgatcatcggtcttttaatcgctctttatggtttaggtcgccgtctttctaaagcggaaaccaacaaagccattgaagacggagtaaaatccacaggtatgattttattcatcaccggtgcgggcggtgcgttaggttatgttgtgcgcgatgccggtatcggtaatgccttaggtgaagcggttctgaccgtcggtatcccgggtattttgattccatttgtaattgccgcgctaatgcgtattgcgctgggtagcgccaccgtcgctttaattacagccgcaaccctggccgccccgcttgtaccgcaattaggtttaaatccgactttagttgccatgtcaacctgtgccggtgcggtatctttcagttacttcaatgacagcggtttctgggtattcaatggtctatacggtttgaaagaagtaaaagatcaatttatggctaaaaccatggtttcgtttatcggtgctttctcctgtttggcgctggtactgatctttaatatctttatgtaa

SEQ ID NO: 10173 - protein, 461 aa, Mannheimia succiniciproducens MBEL55E
METAASMSQMLIGLAIGIALLLILAMKTRIHVFVALILASLTTGLIGGLPFAEVISSVTKGFGSTLGSTGIIIGLGVMMGAILEKSGAAEQMAFSIIKLIGKAKEEWALALTGYVVAIPVFADSGLIILTPLARSLSRMTGKSVIGLGLAMATGLQLAHVFIPPTPGPLAVAGILDIDMGMMIIWGMILTVPTLVMSTLYAKWLGKKIYQIPNEDGTDFERKEFKEEYIKSIENVEQIYKDKNLPGAGLSFSPIVIPLILILGNTTVNFLKIENGFADLLKIVGHPIIALIIGLLIALYGLGRRLSKAETNKAIEDGVKSTGMILFITGAGGALGYVVRDAGIGNALGEAVLTVGIPGILIPFVIAALMRIALGSATVALITAATLAAPLVPQLGLNPTLVAMSTCAGAVSFSYFNDSGFWVFNGLYGLKEVKDQFMAKTMVSFIGAFSCLALVLIFNIFM

SEQ ID NO: 10174 - DNA, 1341 bp, Burkholderia mallei ATCC 23344
  CDS (1)..(1341): transl_table=11
atgctgctgatttacaccgtgatcgcgatcgcggtgctgatcctgatgatcgcgcgctacaaggtgtatccgttccttgtgctgatcatcgtgtcgctcggtctcggcctcgcggtcggcatgccgatggacaagatcgtgaaatcgttcgaggggggcacgggcggcacgctcggccacatcgcgatcgtcgtcggcctcggcacgatgctcggcaagatgatggccgaatcgggcggcgccgagcggatcgcgaccacgctgatcgactggttcggcgagaagaacatccactgggcgatgatgttcgtcgcgatcatcgtcgggctgccggtgttcttcgaagtcggcttcgtgctgctgatcccgatcgcgttcaacgtcgcgaaacgcaccggcaagtcgctgctcgtcgtcgggctgccgatggtggcgggcctgtcggtcgtgcacgggctgattccgccgcacccggcggcgctcctcgccgttcagcaatacggcgccgacatcggcaagacgatcgcgtacggcctcatcgtcggcgtgccgaccgcgatcgtcgcggggccgctgttcgcgctcacgatctcgaagttcgtgaagctgccggagcacaatccgctcgcgtcgcagttcgtcgagacgcgcgcggcgggcgagacgcgcgcgctgccgagcttcggcatcacgctgttcacgatcctgctgcccgtcgtgctgatgctcgtcggcagctgggccgatctcgtgttcgcgccgaaatcgctgccgaacagcctgctgcgcttcgccggcaattcggatgtcgcgctcctgatcgctgtgctcgtgagcttcttcacgttcggcaagctgcagggcttcaatcgcgagcagatccagaagttctgcggcgattgcctcgcgccgatcgcgggcatcacgctgatcgtcggcgcgggcggcggcttcggcggtattctgcgcgacagcggcatctcgcagcagatcgtcgcgaccgcgacgcacgcgcatctgtcgccgctgctgctcggctggttcgtcgcggcgctgatccgtctcgccacgggttcggccaccgtcgcgatgacgaccgcctgcgggatcgtcgcgccgatcgccgcggcctcgggcgtcacggtgcgcccggagctgctcgtgctcgcgacgggctcgggctcgctcatcttctcgcacgtgaacgacggcggcttctggctgatcaaggaatatttcgggatgaccgtggggcagacgttcaagacgtggacgctgctcgaaacgatcatctcggtgctcggtctcaccttcacgctggcgctgagcgcggttctgtaa

SEQ ID NO: 10175 - protein, 446 aa, Burkholderia mallei ATCC 23344
MLLIYTVIAIAVLILMIARYKVYPFLVLIIVSLGLGLAVGMPMDKIVKSFEGGTGGTLGHIAIVVGLGTMLGKMMAESGGAERIATTLIDWFGEKNIHWAMMFVAIIVGLPVFFEVGFVLLIPIAFNVAKRTGKSLLVVGLPMVAGLSVVHGLIPPHPAALLAVQQYGADIGKTIAYGLIVGVPTAIVAGPLFALTISKFVKLPEHNPLASQFVETRAAGETRALPSFGITLFTILLPVVLMLVGSWADLVFAPKSLPNSLLRFAGNSDVALLIAVLVSFFTFGKLQGFNREQIQKFCGDCLAPIAGITLIVGAGGGFGGILRDSGISQQIVATATHAHLSPLLLGWFVAALIRLATGSATVAMTTACGIVAPIAAASGVTVRPELLVLATGSGSLIFSHVNDGGFWLIKEYFGMTVGQTFKTWTLLETIISVLGLTFTLALSAVL

SEQ ID NO: 10176 - DNA, 1386 bp, Neisseria gonorrhoeae FA 1090
  CDS (1)..(1386): transl_table=11
atggacggccggacacagacgctgtccgcgcaaaccttgttgggcatttcggcggcggcaatcatcctcattctgattttaatcgtcaaattccgcatccgcgcgctgctgacactggtcatcgccagcctgctgacggctttggcaaccggtttgcccacaggcagcatcgtcaacgacgtactggtcaaaaacttcggcggcacgctcggcggcgtggcgcttctggtcggtctgggcgcaatgctcggacgtttggtagaaacatccggcggcgcacagtcgctggcggacgcgctgatccggatgttcggcgaaaaacgcgcaccgttcgctccgggcgttgcctcgctgattttcggcttcccgattttcttcgatgccggactaatcgtcatgctgcccatcgtattcgccaccgcacggcgcatgaaacaggacgtactgcccttcgcgcttgcctccgtcggcgcattttccgtcatgcacgtcttcctgccgccccatccgggcccgattgccgcttccgaattttacggcgcgaacatcggccaggttttgattttgggtctgccgaccgccttcatcacatggtatttcagcggctatatgctcggcaaagtgttggggcgcgccatccatgttcccgttcccgaactgctcagcggcggcacgcaagacagcgacccgccgaaagaacctgccaaagcaggaacggtcgtcgccgtcatgctgattcccatgctgctgattttcctgaataccggcgtatcagccctcatcagcgaaaaactcgtaagtgcggacgaaacttgggttcagacggcaaaaatgatcggttcgacacctgtcgcccttctgatttccgtattggccgcactgttggtcttgggacgcaaacgcggcgaaagcggcagcacgttggaaaaaaccgtggacggcgcactcgcccccgcctgttccgtgattctgattaccggcgcgggcggtatgttcggcggcgttttgcgcgcttccggcatcggcaaggcactcgccgacagcatggcggatttgggcattcccgtccttttgggctgcttccttgtcgccttggcactgcgtatcgcgcaaggttcggcaaccgtcgccctgaccacagccgccgcgctgatggctcctgccgttgccgccgccggctttaccgactggcagctcgcctgtatcgtattggcaacggcggcaggttcggtcggttgcagccacttcaacgactccggcttctggctggtcggccgcctcttggatatggacgtaccgaccacgctgaaaacctggacggtcaaccaaaccctcatcgcattcatcggctttgccttgtccgcactgctgtttgccatcgtctga

SEQ ID NO: 10177 - protein, 461 aa, Neisseria gonorrhoeae FA 1090
MDGRTQTLSAQTLLGISAAAIILILILIVKFRIRALLTLVIASLLTALATGLPTGSIVNDVLVKNFGGTLGGVALLVGLGAMLGRLVETSGGAQSLADALIRMFGEKRAPFAPGVASLIFGFPIFFDAGLIVMLPIVFATARRMKQDVLPFALASVGAFSVMHVFLPPHPGPIAASEFYGANIGQVLILGLPTAFITWYFSGYMLGKVLGRAIHVPVPELLSGGTQDSDPPKEPAKAGTVVAVMLIPMLLIFLNTGVSALISEKLVSADETWVQTAKMIGSTPVALLISVLAALLVLGRKRGESGSTLEKTVDGALAPACSVILITGAGGMFGGVLRASGIGKALADSMADLGIPVLLGCFLVALALRIAQGSATVALTTAAALMAPAVAAAGFTDWQLACIVLATAAGSVGCSHFNDSGFWLVGRLLDMDVPTTLKTWTVNQTLIAFIGFALSALLFAIV

SEQ ID NO: 10178 - DNA, 1353 bp, Pseudomonas syringae pv. syringae B728a
  CDS (1)..(1353): transl_table=11
atgttcggtatgacccatgagacgttcctgctcgtcgatgcgttggtgaccatcgtcggcctggtgctgctgatcaccaccttcaaggtgcaccctttcgtcgcgttgaccctggcggcaggctttcttggcctgacctcgggaatgccggtggaaaaagtcatgaaatccttccaggacggcttcggcggcgtactgggcttcgttggtatcatcctcggcctgggcaccatgctcggcaagctgatggccgactcgggcggcgcggaccagattgcgcaaacgctgatacgcaccttcggcaaacagaaagtgcactgggcaatgatgttctctgcctttctggtgggcatcccgctgttcttcgagatcggttttgtcctgctgatcccgctggtgttcatcgtcgcgcggcgcaccggcgtgcccatcgtcaagatcggcattccgctgctggcaggcctgtcggccgtacacggtctggttcctccgcatccaggtccgttgctggccatcggcatcttcggggctgacatcggcaaaaccattttctacggactgatcgttgcgctgccgacggccatcatcgctggcccgatcttcggtaactggatttccaaaagcatccccggcacaccgtccaaggaactgatggatcagatcgccaaggagtcgagcactgaaaacctgccaggcttcggcatcacgctggtgaccatcctgctgccggtcttcctgatgctgctcaagacctttgccgacgtggtgttgccggaaaacaacatgttccgcatctggatggacctgatcggtcacccgatcaccgccctgcttgccgcgctgttgctggcgttctacacctttggtgccgcgcgtggtttcgaccgcagcaagatcatgaagctgctggaccagagtctggccccggtggcggcaatcgtgctgattgtcggcgcaggcggtggcttcaagcagatgctggtcgccagtggcgtaggtgacgtgatcgggcacatggccgtgcaggcgcagatcaacccgatcatgctggcctggctggttgcggcggtcatccgcgtcgcaacaggttcggcgacggtggcaaccattaccggtgctggcatcgtagcgccggtggtcggcctgattccaggggtcaatcgcgagctgctggtgctggcaaccggcgccggctcgttgatcctgtcgcacgtcaatgacgccgggttctggctggtgaagcagtacttcaacatgaccgttgccgagaccttcaagacctggacggtgatggagaccatcctctcggtcgtcggcctgatcttcatcatgctgttgtcaatggcggtgtaa

SEQ ID NO: 10179 - protein, 450 aa, Pseudomonas syringae pv. syringae B728a
MFGMTHETFLLVDALVTIVGLVLLITTFKVHPFVALTLAAGFLGLTSGMPVEKVMKSFQDGFGGVLGFVGIILGLGTMLGKLMADSGGADQIAQTLIRTFGKQKVHWAMMFSAFLVGIPLFFEIGFVLLIPLVFIVARRTGVPIVKIGIPLLAGLSAVHGLVPPHPGPLLAIGIFGADIGKTIFYGLIVALPTAIIAGPIFGNWISKSIPGTPSKELMDQIAKESSTENLPGFGITLVTILLPVFLMLLKTFADVVLPENNMFRIWMDLIGHPITALLAALLLAFYTFGAARGFDRSKIMKLLDQSLAPVAAIVLIVGAGGGFKQMLVASGVGDVIGHMAVQAQINPIMLAWLVAAVIRVATGSATVATITGAGIVAPVVGLIPGVNRELLVLATGAGSLILSHVNDAGFWLVKQYFNMTVAETFKTWTVMETILSVVGLIFIMLLSMAV

SEQ ID NO: 10180 - DNA, 1353 bp, Pseudomonas fluorescens PfO-1
  CDS (1)..(1353): transl_table=11
atgtttggcatgtcccatgacgcctacctgctgctcgatgcagtggttacggtgatcggactcatcgtcctgatcaccaagttcaagattcaccccttcattgccctgaccatcgccgccgcgttccttggcctgacgtccggcatgccgatcggcacgatcatcaaggcgttccaggacggcttcggtggcgtgctcggttttgtcggcatcatcctcgccctgggcacgatgctcggcaagatgatggccgaatccggtggtgccgatcagatcgcccagaccctgatccgcgccttcggcaaggacaaggtgcagtgggcgatgatgttcgccgcgttcctggtgggcattccgctgttcttcgaaatcggcttcgtgttgctgattccgctggtgttcatcgtggctcgccgcactggtgtgtcgatcatcaagatcggtatcccgctgctcgccggtctgtccgccgtgcacggcttggtgccgccgcacccgggcccgctgctggccatcggcgtgttcggtgccgacatcggcaagaccattctgtacggtctgatcgtcgcgctgccgaccgccatcatcgccggcccgatcttcggtacgttcatcgccaagcacattcccggtacgccgaaccaggaactggtcgatcaactggcccgtgaaaacgattcggccaacctgccgagcttcagcatcaccctggtcaccgtgctgctgccggtgttcctgatgctgctgaaaaccttcgctgacgtggccctgccggacggtcatttcttccgcacctggatggacatgatcggtcacccgatctcggcactgctgctggcattgctgctgtcgctgtacaccttcggtcacaagcagggcatcggttctcagcagatgctcaaatggctggacgcgagcctggcgccgaccgcggcaatcattctgatcatcggcgccggcggtggcttcaagcagatgctggtgaccagcggcgtgggcgacgtgatcggccacatggcggtcagcgcgcagatctcgccgatcctgctggcgtggctggtggcggcggtgatccgcatcgcgaccggttcggccaccgtggcgaccatcactggcgcgggcatcgtggtgccggtggtggggatgatcccgggcgtgaaccgtgagctgctggtgctggccaccggtgccggttcgctgatcctgtcccacgtcaacgacgccggtttctggctggtgaagcagtacttcaacatgaccgtggccgagaccttcaagacctggacggcgatggaaaccatcctgtcggtggtggggctgggctttattctgttgttgtcgctgttcgtttaa

SEQ ID NO: 10181 - protein, 450 aa, Pseudomonas fluorescens PfO-1
MFGMSHDAYLLLDAVVTVIGLIVLITKFKIHPFIALTIAAAFLGLTSGMPIGTIIKAFQDGFGGVLGFVGIILALGTMLGKMMAESGGADQIAQTLIRAFGKDKVQWAMMFAAFLVGIPLFFEIGFVLLIPLVFIVARRTGVSIIKIGIPLLAGLSAVHGLVPPHPGPLLAIGVFGADIGKTILYGLIVALPTAIIAGPIFGTFIAKHIPGTPNQELVDQLARENDSANLPSFSITLVTVLLPVFLMLLKTFADVALPDGHFFRTWMDMIGHPISALLLALLLSLYTFGHKQGIGSQQMLKWLDASLAPTAAIILIIGAGGGFKQMLVTSGVGDVIGHMAVSAQISPILLAWLVAAVIRIATGSATVATITGAGIVVPVVGMIPGVNRELLVLATGAGSLILSHVNDAGFWLVKQYFNMTVAETFKTWTAMETILSVVGLGFILLLSLFV

SEQ ID NO: 10182 - DNA, 1359 bp, Rhodospirillum rubrum ATCC 11170
  CDS (1)..(1359): transl_table=11
atgcaccccgatacaacgctgatccttatcgcagccgcctcgatcgttcttctggtgctgctggttacccgcctgaagcttcacccctttttggccctgatggtcgccgccgcctttcttgggctggccagcggcctcgcgccgaccgatgcggtcaagaccttccagaagggctttggcaatatcctgggctcggtcggcctggtcgtcggccttggcagcatgttgggcggcctgttgctcaacaccgggggtgccgatcgcatcgccaacgccttcgtcggtcgcggttcgacggtgtggctgcccacatcgatctgcgcggcggccttgctgatcggcatgccccatctgtttgatgtcagcttcgtcatgctggtgccgctggtcttcgccatcgccaagcgcaccggcagccatctgatgcgtgtcggcctgccgatggcggcggggctttacgtctcgcacggcttcttgctgccccatccctcgccgaccttggctttggccatctatcatggcgacgccgggcgggcgatcctctttggtttcctgctggcgatcccgacggccatcctctcgggcccgctgctcacctcctttgccatgcgttggttcaaggatccgatcgacatcacccatagcccgatcatgacggcggccggacggagcgatgtcaccacgcttgataacgccccccgactgccggtggttctgctgaccgtcctgctgccgcccggtttgatgctgttgcgcaccctgttggccgaccatgttcccgaaggcgccgcccgggcctttctcgatggcatcggcaatcccatcgtctcgctggccatcgccgtgttgtttgccatctgggcccttggggtgcgctcgggccgttcgctgggcgagatccagaagctgctcggcaaaagcctggccccggccgccggggtgatcctgatcgtcggcgccggtggcggtctcaaggaaatgctgctcggcacccatatcggcgacatgatcgccagcggcgcggcgcaatgggcgatctcgcccctggtgctggcctgggtgatcgccgccctgatgcgcatcgccgtcggctcggccaccgtcgccacggtcaccgccgccgggttgatggcgccggtgcaggcgctccaccccgaaatcagccccgaattgatgaccatctcggtcgccaccggcgggctgatgctctcccacctcaacgacagcggcttctggctgttcaaggaatacttccaactcaccgtcgcccagacgctgaaaagctggacgttgatggtctcggtccagtcggcgcttggtctggccggtgttctgctgatcgacgcggtgatccgctaa

SEQ ID NO: 10183 - protein, 452 aa, Rhodospirillum rubrum ATCC 11170
MHPDTTLILIAAASIVLLVLLVTRLKLHPFLALMVAAAFLGLASGLAPTDAVKTFQKGFGNILGSVGLVVGLGSMLGGLLLNTGGADRIANAFVGRGSTVWLPTSICAAALLIGMPHLFDVSFVMLVPLVFAIAKRTGSHLMRVGLPMAAGLYVSHGFLLPHPSPTLALAIYHGDAGRAILFGFLLAIPTAILSGPLLTSFAMRWFKDPIDITHSPIMTAAGRSDVTTLDNAPRLPVVLLTVLLPPGLMLLRTLLADHVPEGAARAFLDGIGNPIVSLAIAVLFAIWALGVRSGRSLGEIQKLLGKSLAPAAGVILIVGAGGGLKEMLLGTHIGDMIASGAAQWAISPLVLAWVIAALMRIAVGSATVATVTAAGLMAPVQALHPEISPELMTISVATGGLMLSHLNDSGFWLFKEYFQLTVAQTLKSWTLMVSVQSALGLAGVLLIDAVIR

SEQ ID NO: 10184 - DNA, 1386 bp, Moorella thermoacetica ATCC 39073
  CDS (1)..(1386): transl_table=11
atgggaggcatttccggaattcagataattattggtctgattgttggtatctttgtgcttgtatatttaatactgaggaccaaaattcatgcttttcctgctcttatcattgcggcttccgtaatcgggttaattggtggtatgtcaccatctacaggtgatattaaccttgctaaatcaatcactactggctttggtaatactttagcaagtatcggtctcgtaattggttttggcgtaatgatgggacgattgctggaggtatccggggctgccgaacgtatggcttatactttcttaaagtatctaggacgtggaaaagaagaatgggcgctggccgcaacgggatatgtcatttctattcctattttctgcgattcgggttttgttattttaacacccctggttaaagcgttatcacgtagaaccaaaaaatccgtacttgctcttggtgtcgctctggcagccggtctagtggctacccatagtgcagtaccaccaacaccgggacctctggcagtagcaggcatttttaaagttgatgtaggtatggtaattatttccgggcttatatttaccataccaataactatagctggggttttgtacggcaaatggttgggtaaaaaaatatatcaattacccagtgaagatggtcagagctggatacgaccaccttaccaatcttctcagattgccgaagaagcattgcctgaaaatggcaacctgccttccgcttttatatcctttgcccctgttgttattcctttaattttaatctttgtcaatacgttgctgacagctatgaaaataaaccaactatgggcgcgctacctagttttcctgggtaatccggtaatagcggttggtattggtcttattattgctatttatggtctggctccgaaactttctcggtctgaagtactaaaaaagatggaagaaggggtttcttcagctggtataattatcttaattacaggtgctggtggcgcattaggccaggtgttaagggacagtggtgtcggtaattatgtagctcaacttattgcttctagccctctgcctccatttttgttacccttttttgttgctacttttgtacgattagtccagggaagcggtacagtagccatgattacctctgcttccattactgcaccaattttggccaatctttccgttaatccaatcattgctgttcaagcagccaatttaggttcattgatatattcttatttcaatgacagttttttctgggtagtcaatagatttttaggtgtcgatgacattaaggaacaaacactgacgtggtcggttccgactacaattgcttggggcgtttctttgattatgttatacattgccaacgccattttaagctaa

SEQ ID NO: 10185 - protein, 461 aa, Moorella thermoacetica ATCC 39073
MGGISGIQIIIGLIVGIFVLVYLILRTKIHAFPALIIAASVIGLIGGMSPSTGDINLAKSITTGFGNTLASIGLVIGFGVMMGRLLEVSGAAERMAYTFLKYLGRGKEEWALAATGYVISIPIFCDSGFVILTPLVKALSRRTKKSVLALGVALAAGLVATHSAVPPTPGPLAVAGIFKVDVGMVIISGLIFTIPITIAGVLYGKWLGKKIYQLPSEDGQSWIRPPYQSSQIAEEALPENGNLPSAFISFAPVVIPLILIFVNTLLTAMKINQLWARYLVFLGNPVIAVGIGLIIAIYGLAPKLSRSEVLKKMEEGVSSAGIIILITGAGGALGQVLRDSGVGNYVAQLIASSPLPPFLLPFFVATFVRLVQGSGTVAMITSASITAPILANLSVNPIIAVQAANLGSLIYSYFNDSFFWVVNRFLGVDDIKEQTLTWSVPTTIAWGVSLIMLYIANAILS

SEQ ID NO: 10186 - DNA, 1314 bp, Saccharophagus degradans 2-40
  CDS (1)..(1314): transl_table=11
atggaaattttcggtgttttagcgtcaatcgtactgcttgtgggcctaattgtttggctaaaaattcacccctttttagcatttttggccacctctatattcgcaggtattattcttaatattccactgcaagatattccgcaggcgattgaaacaggcataggttcaacgcttagcggtttagtaatagttatttgcgtaggcgccatgtttggcaagctggtatcagaaagtggtgcagcacaaaaaatagcacaggtattgataggcgcattcggccccaagcgcatcacttgggcgcttatgctcacaggctttattgtcggtatcccactgttttacaacgtgggttttgtactgttagtgccactcgtattttctgttgtttaccaatctaagctgccagccgtttatttgggtatcccattacttgctgccttgtctgttacgcatggctttctaccgccgcatccatcgcctacagccatggtgcccatgttcaacgctgaattaagcacaacgcttatttacggtttaattgtggcaatacccaccatgattcttgcgggaccggtgtttgccaatgctttaaaaaatattaaatcgacaccgctagccacatttactcccaaagacctacctgataaccagctacctagcgccaccaatgcattcgctacagccctgctacccgttgttcttattgctggactatcgtttttgccgtcgcaggcagcaactggctcgcagctacacaacctattcacattcttagccaatccttcactcataatgcttgcagcacttgcggttgctacttacacgctgggcattcgccaaaacgtgaaaatacaaacacttatggaaaggtatgccgatgcgataaaagacatctccataattatgttaattgtggctggagcgggtgcgctaaagcaggtttttgttttgagtggcgtaagttcagatattggcgcactgatgcagaacttagccattaaccctctgttactgggttggtttattgccacagtgatacgaatttgcctggggtctgcaacggtggcaggcctaaccgctgccggcataatggcgccagttctgcccttgaccggcgccgacccgaacttaatgattcttgctattggcgcggggagcttgatgtgcagtcacgttaacgactcaggcttttggatgtttaaggagtacttcaatttaagcgtaaaagacacccttaaatcctggacattaatggaaaccatcgtaggtattggtggaattacagcggtactcattcttgacgtttttgtgtaa

SEQ ID NO: 10187 - protein, 437 aa, Saccharophagus degradans 2-40
MEIFGVLASIVLLVGLIVWLKIHPFLAFLATSIFAGIILNIPLQDIPQAIETGIGSTLSGLVIVICVGAMFGKLVSESGAAQKIAQVLIGAFGPKRITWALMLTGFIVGIPLFYNVGFVLLVPLVFSVVYQSKLPAVYLGIPLLAALSVTHGFLPPHPSPTAMVPMFNAELSTTLIYGLIVAIPTMILAGPVFANALKNIKSTPLATFTPKDLPDNQLPSATNAFATALLPVVLIAGLSFLPSQAATGSQLHNLFTFLANPSLIMLAALAVATYTLGIRQNVKIQTLMERYADAIKDISIIMLIVAGAGALKQVFVLSGVSSDIGALMQNLAINPLLLGWFIATVIRICLGSATVAGLTAAGIMAPVLPLTGADPNLMILAIGAGSLMCSHVNDSGFWMFKEYFNLSVKDTLKSWTLMETIVGIGGITAVLILDVFV

SEQ ID NO: 10188 - DNA, 1398 bp, Burkholderia xenovorans LB400
  CDS (1)..(1398): transl_table=11
atggaagctgtccacggcagcatgctgctggtcttcgcggcgatcgccatcgcattgctgatcctgctgatcacgcgctacaaggtttacccgttcctcgttctgatcatcgtgtcgctgctgctgggtctcgcatccggcatgccgatcggcaccatcgtcaaatcgttcgaaacgggcaacggcaatacgcttggccacatcgcgatcgtggtcggcctcggcacgatgctcggcaagatgatggccgaatccggcggcgcggagcgcatcgccaccacgctgatcgacttcttcggcgagaagaacatccactgggcgatgatgatcgtcgcgatcatcgtgggcttgccggtgttcttcgaagtcggcttcgtgctgctgattccgatcgctttcaacgtcgcgaagcgcaccaacaagtcgttgctgctggtcggcttgccaatggtcgcgggtctgtccgtcgtgcacgggctgcttccgccgcacccggccgcgatgctcgcggtgcaggcatatcacgcggatatcggcaggaccatcgcctatggcctgattgtcggcgtgccgaccgcgatcgtcgcgggtccgttgtttgcgttgatgatcagccgctatatcaagctgccgaaagacaacgcgctcgcctcgcaatttctcggcgccgatgaaaccggtgcggcgaacaacggcaacggcgagcaaaagaccgcgcccaggcgcgaactgccgagcttcggcgtgacgctgttcacgatcctgttgccggttatcctgatgctggtgggcagttgggccgacctcgtgttcacgccgaagaccctcgcgaacgatctgctgcgtttcgtcggcaattcggatgtggcgctgctggtcgcggtgctggtcagtttctggacctttggtgcgagccgtggcttcgatcgcgagcagatccagaaattctgcggcgaatgtctcgcgccgatcgcgggcattacgctgattgtcggcgcgggcggcggctttgggcgcgtgctgatggatagcggcatttcgaaggagatcgtcaacgcggcgacgtcggcgcatctgtcgccgctgctgttcggctggctggtcgcggcgctgattcgcctggccaccggctcggcgacggtcgcgatgaccaccgcttgcggcatcgtcgcgccgatcgcggcggcgggcgcggtgcaggtgaagccggaactgctggtgctggccacgggttcgggctcgctgatcttttcgcacgtgaacgacggcggtttctggctgatcaaggaatacttcgggatgacggtggggcagaccttcaagacatggtcgctcctcgaaaccatcatctcgctgatgggtctgggtttgaccttcgcactcgcgacggtcgtgtaa

SEQ ID NO: 10189 - protein, 465 aa, Burkholderia xenovorans LB400
MEAVHGSMLLVFAAIAIALLILLITRYKVYPFLVLIIVSLLLGLASGMPIGTIVKSFETGNGNTLGHIAIVVGLGTMLGKMMAESGGAERIATTLIDFFGEKNIHWAMMIVAIIVGLPVFFEVGFVLLIPIAFNVAKRTNKSLLLVGLPMVAGLSVVHGLLPPHPAAMLAVQAYHADIGRTIAYGLIVGVPTAIVAGPLFALMISRYIKLPKDNALASQFLGADETGAANNGNGEQKTAPRRELPSFGVTLFTILLPVILMLVGSWADLVFTPKTLANDLLRFVGNSDVALLVAVLVSFWTFGASRGFDREQIQKFCGECLAPIAGITLIVGAGGGFGRVLMDSGISKEIVNAATSAHLSPLLFGWLVAALIRLATGSATVAMTTACGIVAPIAAAGAVQVKPELLVLATGSGSLIFSHVNDGGFWLIKEYFGMTVGQTFKTWSLLETIISLMGLGLTFALATVV

SEQ ID NO: 10190 - DNA, 1362 bp, Ralstonia metallidurans CH34
  CDS (1)..(1362): transl_table=11
atgggtgccgttacaggaaccacgctcttggtctatgcgctgatcgccgtgatcgcgctggtgatcctgatcgccaaattcaaactgaacccattcatcacgctcgtggtggtctcggtggcgctgggcttcgccgtggggatgccgatgggcgacatcatcaagtcgttcgaagcgggtgtcggcggcacgctcgggcatatcgcgctcgtgatcgggctcggcacgatgcttggcaagatgatggccgaatcgggcggcgccgagcgcatcgcgctgacgctggtcgacttcttcggcgagaagaacgtgcactgggcgatggtggtcatcgccttcatcgtcggcctgccggtgttcttcgaggtaggcttcgtgctgctcgtcccgatcgccttcaacgtcgccaagcgcaccaatacctcgatggtgctggttggcatcccgatggtcgccggcctctcggtggtgcacgggctgattccgccgcaccctgccgcgctgctggctgtgcaggcctacggcgctgacatgggcaagacgatcatgtacgcgctgatcgtcggtgtcccgacagccgccatcgctggcccgctgttcgccaagctgatcgaccgccacgtgaagctgcccgaggtcaacccgctggccgcgcagttcaccgaagaagccgagaacatcaaggccacgcgccaattgccaggcttcggcatcactgtcttcacgatcctgctgccggtgattctgatgctgattggtagctgggcggacctgattgccacgccgaagaccttcgccaacgacttcctcaagctgatcggtaactcggtcatggcactgctgatcgccgcgctggtcagcttctataccttcggcaaggcccgcggcttcggtcgcgatgcgatcctgaagttcaccaacgagtgcgtggcgccgaccgccatcatcaccctcgtggtgggtgccggcggtggcttcggccgcatcctgcgcgactccggcatctccaccgccatcgtcgacgtggcaacccacgcaaacgtctcggtgctggtattgggctggctggtggccgtgatgatccgcatcgccaccggctcggccaccgtggccatgaccaccgccgccggcatcgtcgccccgatcgccgccagcgtgccgggcacgcgccccgaactgctggtgctgacgaccggcgccggttcgctgatcctgtcgcacgtcaacgacggcggcttctggctggtcaaggagtacttcaacatgaccgtgacccagaccttcaagacctggtcggtcgccgaaacgatcatttcggtcgtggcgttgctactgacgctgggactggcgacggtgacctga

SEQ ID NO: 10191 - protein, 453 aa, Ralstonia metallidurans CH34
MGAVTGTTLLVYALIAVIALVILIAKFKLNPFITLVVVSVALGFAVGMPMGDIIKSFEAGVGGTLGHIALVIGLGTMLGKMMAESGGAERIALTLVDFFGEKNVHWAMVVIAFIVGLPVFFEVGFVLLVPIAFNVAKRTNTSMVLVGIPMVAGLSVVHGLIPPHPAALLAVQAYGADMGKTIMYALIVGVPTAAIAGPLFAKLIDRHVKLPEVNPLAAQFTEEAENIKATRQLPGFGITVFTILLPVILMLIGSWADLIATPKTFANDFLKLIGNSVMALLIAALVSFYTFGKARGFGRDAILKFTNECVAPTAIITLVVGAGGGFGRILRDSGISTAIVDVATHANVSVLVLGWLVAVMIRIATGSATVAMTTAAGIVAPIAASVPGTRPELLVLTTGAGSLILSHVNDGGFWLVKEYFNMTVTQTFKTWSVAETIISVVALLLTLGLATVT

SEQ ID NO: 10192 - DNA, 1314 bp, Cytophaga hutchinsonii ATCC 33406
  CDS (1)..(1314): transl_table=11
atgtccttactttttattttactaacaatcatcacaacgttaatttttttaacggctgttcttaaaatatccccattcatatcgtttatccttgttaccattcttgccggtatactacttggtatgccattgggtaatatcgtacagtcttttcagaaaggtatcggcgatatgctcggaagtattctggttacattaactgccggcgccatgctcggtaagctggtggctgaaagcggtgcggcaacggttatcgcagataagatcattgctgtgtgcggtaaaaaatacctgcagtggggcttactgttaacaggtttgattattggtattccattgttttataatgtaggctttgtattgatcataccgattgtttttaccttgtcttaccggtataaattgcctgccgtgtatgtgggcattccgatgcttgcagccttgtctgtggcgcatagtctgttgccgccgcatccttctccggcatcactggtaggtacctttcaggcaagtatgatcaaaacattcttatacggtattgccgttgcagtgccggcaattattctggccggacctgtttttgcacgcacattaaggcatattcaaccgcagggagaacttcctctggttgagcacacggttgctgcccattccttaccgggtgtgtttaacagcattttctctgcgttgttgccggtatttctattactgacgacctttctgctttcgtttatcatagaaaacaaacaagtaattcaggtactttcattcataaaagagccgtctgtgcttatgctgctttcgttgttagttgtaagcattacattaggtacgcagcaacggactagcatgaagcacatcatgcgtacatatgaagcaggaataaaagatatcgccatgatcctgctgatcatcggagcatccggcgggttaaaacaagtactcattgatagtgaagcaagcatcgtccttgccggatatttccaatcgcttcagataaacccgctgatattaggctggctcattgccgctatcatccgtctgtgcctgggttcagccaccgtagccggtttaacagctgccggtattattgctccgctcatgccgcatataagtgcagatcccaacctgatgattcttgccataggcgcaggcagtattttctgttcgcatgtaaacgatacgggtttctggatgtttaaagaatactttaacgtatctataaaagatacgtttttatcctggacaatcatggaaagcattgtgtctgttgcgggcctggccggcgtactgcttttaagcatatggctttaa

SEQ ID NO: 10193 - protein, 437 aa, Cytophaga hutchinsonii ATCC 33406
MSLLFILLTIITTLIFLTAVLKISPFISFILVTILAGILLGMPLGNIVQSFQKGIGDMLGSILVTLTAGAMLGKLVAESGAATVIADKIIAVCGKKYLQWGLLLTGLIIGIPLFYNVGFVLIIPIVFTLSYRYKLPAVYVGIPMLAALSVAHSLLPPHPSPASLVGTFQASMIKTFLYGIAVAVPAIILAGPVFARTLRHIQPQGELPLVEHTVAAHSLPGVFNSIFSALLPVFLLLTTFLLSFIIENKQVIQVLSFIKEPSVLMLLSLLVVSITLGTQQRTSMKHIMRTYEAGIKDIAMILLIIGASGGLKQVLIDSEASIVLAGYFQSLQINPLILGWLIAAIIRLCLGSATVAGLTAAGIIAPLMPHISADPNLMILAIGAGSIFCSHVNDTGFWMFKEYFNVSIKDTFLSWTIMESIVSVAGLAGVLLLSIWL

SEQ ID NO: 10194 - DNA, 1395 bp, Rhodococcus sp. RHA1
  CDS (1)..(1395): transl_table=11
atgagtaccgcgtcactactcgcagcggccgacagtgccggccacgacgcgcggctgatcacggctgccgtcgtcggcgtcgccgtcatcatcgcgctgatcacctggctcaaactccacccgttcctcgcgctgtcgatcggcgccgtcggcgtcggtatcgccgcaggtctgggcgggcaagactcggtgaagtctttcgtcgagggcttcggggccacgatgggcagcgtcggaatcctcatcggattcggtgccatgttcggcaagctgctcgccgattccggtggcgccgaccgcgtcgtcgacaccctcgtcggacgggcaggtccgcggacgctgccgtggatgatggcgctggtcggcgcagtgatcggcctgccgatgttcttcgagatcggcctcgtgctgctgatgcccgtcatcatcctggtcgcgcggcgttcgggactgtcgctgatgcggatcgcgattcccacgctggcaggtctgtcggccatgcacggtctcgttccgccgcaccccgggcccctggtcgcggtggcggccctgaacgccaacctcggactcaccctcgcgctcggcgtcctcgtcgcgatccccaccgtcgtcatcgccggaccgctgttcagcaagctggcggcacgctgggtggacgtccccgtccccgagctctacgtgaccgtcgaagaccgggaaggcgccgaggctgccgccgagcgtcgccggcccagcttcgcggccaccctgtccgcgatcctgctgcctgtcgtcctgatgctgggcaaggcgatcgccgacgtcatcgccgccgactcggagtcgcccgcgaaggcgctgctcgacttcctcggtacaccggtcgtggccctcgggctcgcggtgctcgccgggatggcgcttctcggccgcggtggcggcatggaccgcaaggccatcgccgtctcgctggagagttcgctgcccccgatcgccggaatcctcctcatcgtcggcgccggcggcggattcaagcaggtcctgatcgacaccggcatcgccgatgtgatcgccgacgcgatcaaggacagcgccctgcccgttctgttcctcgcctggctcgtggccgtgctcatccgcgtcgccaccggatcggccaccgtcgcgacggtcaccgcgtccggcatcctcgcgcccgtcgccgccgaactgacctcgacgcacgtgtcgctgatggtgctggcgatcggctccggctcgctgttcctgtcgcacgtcaacgacgcgggattctggctggtgaaggaatacctcggcgtcacggtggtacagaacctgaagacgtggacggtgatggaatgcatcatctccgtcaccggtctcgccggggtcctcgcactgagcgtattcatctaa

SEQ ID NO: 10195 - protein, 464 aa, Rhodococcus sp. RHA1
MSTASLLAAADSAGHDARLITAAVVGVAVIIALITWLKLHPFLALSIGAVGVGIAAGLGGQDSVKSFVEGFGATMGSVGILIGFGAMFGKLLADSGGADRVVDTLVGRAGPRTLPWMMALVGAVIGLPMFFEIGLVLLMPVIILVARRSGLSLMRIAIPTLAGLSAMHGLVPPHPGPLVAVAALNANLGLTLALGVLVAIPTVVIAGPLFSKLAARWVDVPVPELYVTVEDREGAEAAAERRRPSFAATLSAILLPVVLMLGKAIADVIAADSESPAKALLDFLGTPVVALGLAVLAGMALLGRGGGMDRKAIAVSLESSLPPIAGILLIVGAGGGFKQVLIDTGIADVIADAIKDSALPVLFLAWLVAVLIRVATGSATVATVTASGILAPVAAELTSTHVSLMVLAIGSGSLFLSHVNDAGFWLVKEYLGVTVVQNLKTWTVMECIISVTGLAGVLALSVFI

SEQ ID NO: 10196 - DNA, 1338 bp, Haemophilus somnus 129PT
  CDS (1)..(1338): transl_table=11
atgaatactcaactttaccttgtcgcagttttaatatcaggtttggcacttattattttttctattttgaagttaaagcttcatccttttttagcattgttactgtcaggtttttatgttggaattttgatgggaatgaaaccattagaaatgctggatgctatagaaaacggtataggcggaacattggggttccttgctgctgttataggactgggaacaattttaggaaaaatgattgaggtatctggcggagctgaacggattggattgacacttcaaaaaattagatggctttcacctgatgtgataatggttttgatcggattgatttgtggtattacactttttgttgaagtcggcgtggttttattgattcctttagcattttcgattgccaaacgtactaaagtatcattattaactttagctattccgttatgtaccgctcttatggctgttcattgtattgttccccctcatcctgctgctctttatgtaaccaatgcgttaggtgcagatatgggaaaagtcattatttatggattacttattgggttatttacatcactattcgctggtcccgtgtttttacgtatgatgaaacgtcaagttccgtttaagaaagtcccagaggaattttcttctttaacggtacgtcaagaacatgaacttccgtctttatttgctacattatttacaattttgttaccgatagtattaatgctgtttaaaacgcttgctgaattgaccatagaaaaaaagactgttttttataccgcacttgaagtgattggcaatcctattactgctatgcttattggggcatttgttgcgtattatttgcttggtataaaacatcaccaaagtatggaatccttattaaaaaatactgaaaatggatttatggctattggtaatattttactgattataggtgccggaggggcatttaacagtattttaaaggcgagcggattaagtgatggattggctgagattttagcaaattttaatacacatcctattctattggcatggcttgttgctattgttttacatgccgcagtgggttctgcaacggtagcaatgatgggagcaacggcaatcgtgtcgccattacttgttacttaccctgatattagccccgaaattattgtccttgctattggttctggtgcgataggatgcactattgtaacggattctctcttttggttggtcaagcaatattgtggtgcaaccttgaatgacatttttaaatattataccggtgcaactttcatcgcttccgtattagcactcgggtttacatttttattatcaacagtgatttag

SEQ ID NO: 10197 - protein, 445 aa, Haemophilus somnus 129PT
MNTQLYLVAVLISGLALIIFSILKLKLHPFLALLLSGFYVGILMGMKPLEMLDAIENGIGGTLGFLAAVIGLGTILGKMIEVSGGAERIGLTLQKIRWLSPDVIMVLIGLICGITLFVEVGVVLLIPLAFSIAKRTKVSLLTLAIPLCTALMAVHCIVPPHPAALYVTNALGADMGKVIIYGLLIGLFTSLFAGPVFLRMMKRQVPFKKVPEEFSSLTVRQEHELPSLFATLFTILLPIVLMLFKTLAELTIEKKTVFYTALEVIGNPITAMLIGAFVAYYLLGIKHHQSMESLLKNTENGFMAIGNILLIIGAGGAFNSILKASGLSDGLAEILANFNTHPILLAWLVAIVLHAAVGSATVAMMGATAIVSPLLVTYPDISPEIIVLAIGSGAIGCTIVTDSLFWLVKQYCGATLNDIFKYYTGATFIASVLALGFTFLLSTVI

SEQ ID NO: 10198 - DNA, 1353 bp, Pediococcus pentosaceus ATCC 25745
  CDS (1)..(1353): transl_table=11
atggaaattatggtcttagttattggaataattttattgttaactttaattataaaatttaagatgaatacttatgtttcattgattattactgcggtggttgttggattaggtttagggatgccggctagccagattgccaccacgattcaaaatggaattgggagtcaattgggtgaactagcgttggtatttggctttggagctatgttgggtcgcttggttgccgacgcagggggagcctatcggattgctaataccttaatcgataaattcggacgccgcttcttacaaattgctgttgtagttgcttcgtttattattgggattgcacttttctttgaagtaggaatcgtgttattagtaccaattgtattcgcaattgcgatcgaagcaggggttccagttctttccttaggaattccaatggcagcagccttatcagttactcacggatttttgccaccacatccagctcctactgcaattgctgcagtcctgaatgctaatgctggaaaggttttactttacggagtgattattgcaattccaactgtttatattgcaggtgtattattttcaaaaattgctaaaaaatatcttccagaagcgtttaaaagaaatggtaatttaaaagctttaggacctcaaaaacaatttaaattagaggaaactccgggattcggtatttcggttttaactgctcttttcccagtcatcttaatggctatcacaacgatatatgaattgattgtccacgacggtgttacgcctaaaaatcctaatgcggttgacaatttttttggatttatcggttctcctagtatagctatgttaatttcattattgtttgcaatgtggttgatgggttatcaccgtaagattgctagtaaagatattatggctactttagaagatgcggtgaaatcaattgcaatgctccttctggtaattggtggtggaggtgcgtttaaacaagttttaattgatggtggtgttggagatgcggtcaaaaatatctttgcatcatctagtatctctcctctaattttaggatggttgatagcggtagtccttcgagtggctttaggatccgcaacggtggcatctctaactgctgccggtttagtattacccttaatgcaaggggcgggaattgatcctgcattaatggtgttatcagttggagcaggaagtttagctgcgagtcacgttaatgatgcaggcttctggatgttcaaagaatactttgatttatccgttaaagaaaccttactaacatggacagtactagaaacagtcatttcgattgttggattaattggcgtgttattattaagtttgattgtttaa

SEQ ID NO: 10199 - protein, 450 aa, Pediococcus pentosaceus ATCC 25745
MEIMVLVIGIILLLTLIIKFKMNTYVSLIITAVVVGLGLGMPASQIATTIQNGIGSQLGELALVFGFGAMLGRLVADAGGAYRIANTLIDKFGRRFLQIAVVVASFIIGIALFFEVGIVLLVPIVFAIAIEAGVPVLSLGIPMAAALSVTHGFLPPHPAPTAIAAVLNANAGKVLLYGVIIAIPTVYIAGVLFSKIAKKYLPEAFKRNGNLKALGPQKQFKLEETPGFGISVLTALFPVILMAITTIYELIVHDGVTPKNPNAVDNFFGFIGSPSIAMLISLLFAMWLMGYHRKIASKDIMATLEDAVKSIAMLLLVIGGGGAFKQVLIDGGVGDAVKNIFASSSISPLILGWLIAVVLRVALGSATVASLTAAGLVLPLMQGAGIDPALMVLSVGAGSLAASHVNDAGFWMFKEYFDLSVKETLLTWTVLETVISIVGLIGVLLLSLIV

SEQ ID NO: 10200 - DNA, 1500 bp, Oenococcus oeni PSU-1
  CDS (1)..(1500): transl_table=11
atgtcgtcacttgcagctattactgtcgatccgaaaaccggctttttttcttggctggttaacgggtttaatatttggcctttcctgattttagttttaggaatcgctttacttttaactttgattttaaaatttaaaatcaatacttttgttactttgatccttgtttcaattattgttgctttcgctttgggaatgaatccggccgggattgctgcggcaatacaaaacggaattggtggaaccttgggcgaattggttgttgtcttcggatttggttctatgatcggccgcttggtttccgattccggtggttcttatcgaattgccaaaactttgattgctaaattcggacggaaaaggctccaatgggcggttgcttttgcttcgtttattattggaatttccctgctgtttgaagttggattagttgttttgattccaatcgtctttgcgatcgccttggaagccgatgttcctttgctctatttgggtattccaatggcgaccgccttgtcggcggcccaaggctttctgcctcctcaaccatcaccgacggcggtcagcaatcttcttggtgccaacatgggaatggtcttgatttatggaattatcgtggcaattccggcgatgattatcgctggtcctgtgtttacgagaatagcccaaaaatatgtaccaaaagcttttaaaattaccaagcatctagacgctttgggaacagttaaggaatttaaattagaggataccccgtcatttggaatttctattttgacttccttgatggcagttatctttatggttattacaacaattattacgatggttgttaatggtggaaaacaggtttacaccggtacgatcggtgatgctgcatggaaggcaatgagaactgcggaccaaaaaggttatctgcttcatccaacaacttttcagaaaatcattgcttttcttggcaatcctttaattgcgatggtaattgctttattgtttgctctttggtcaatgggaccgcttcaggggcgttcgattaaagatgttaataatacattaaccgatgctatcaaatcgattgcgaatttgctgatggttattggtggtggagctgcctttaaaggtgtcctgacttccggtggaatttcaaccgcaattgctcaggcctttgctcactcgtcaatgtcgccgattctgtttgcctggttggttgctgtaataattcgtgtttcagttggttcggcgactgttgccggaatgacttcagctggtattgttgctccgattgtagcttcgcaaacagctattaacccggcatttgttgttttggctatcggtgccggttcgctagctgccagccatgttaacgatgctggtttctggatgttcaaggaattctttgatttggatgttaaagaaactttgaaaacctggactgtattggagactttgatttccgtagttggattattaatggttcttttgttgtcgacgattttccactga

SEQ ID NO: 10201 - protein, 499 aa, Oenococcus oeni PSU-1
MSSLAAITVDPKTGFFSWLVNGFNIWPFLILVLGIALLLTLILKFKINTFVTLILVSIIVAFALGMNPAGIAAAIQNGIGGTLGELVVVFGFGSMIGRLVSDSGGSYRIAKTLIAKFGRKRLQWAVAFASFIIGISLLFEVGLVVLIPIVFAIALEADVPLLYLGIPMATALSAAQGFLPPQPSPTAVSNLLGANMGMVLIYGIIVAIPAMIIAGPVFTRIAQKYVPKAFKITKHLDALGTVKEFKLEDTPSFGISILTSLMAVIFMVITTIITMVVNGGKQVYTGTIGDAAWKAMRTADQKGYLLHPTTFQKIIAFLGNPLIAMVIALLFALWSMGPLQGRSIKDVNNTLTDAIKSIANLLMVIGGGAAFKGVLTSGGISTAIAQAFAHSSMSPILFAWLVAVIIRVSVGSATVAGMTSAGIVAPIVASQTAINPAFVVLAIGAGSLAASHVNDAGFWMFKEFFDLDVKETLKTWTVLETLISVVGLLMVLLLSTIFH

SEQ ID NO: 10202 - DNA, 1335 bp, Leuconostoc mesenteroides subsp. mesenteroides ATCC 8293
  CDS (1)..(1335): transl_table=11
atgccattgttaacagttttgattggtgtcattttactcgtattcttgattactaaatttaagttgaacacttttttatcgttagtcattacagcgtttgttgtcggcttaattttaggtattccagtttctgatatttcaacaagtattgagacaggaataggtggtcagttaggccacttagcgattatatttggatttggatcgatgcttggaaagttaatttccgacgcaggtggtggctttcgaattgcgcaccagctcattgcgacttttggaaaaaaacgcattcaaattgctgttattattacgtcgtttattattggtttagctttgttttttgaagttggattagtcgtgttattgccaattatcttcgtcattgcacgtgaagtaaatatgcctcttttgtaccttggtattccaatggctgcgacattaaatgttgcacacggtttcttaccaccgcatcctgcaccgactgctgtatcacaggtgttgaatgcgcctttggggcacgttttactgattggtattttagtgtcaattcccacgatcattatttctggtccggtgttcaactattttttgcatcgagtatatccgcaagtttataaaaaagatattaatatttctgttttaggtgagtacaaagaattcgagttgaaagatacaccaaagtttggtattagtgttttgacagcattattaccagtaatattgattagtattgcaaccatcttatcatttgttttgccagctaagtcagttatttatcaaatcgtcacatttatcggtgcacctgatgtagctatgctcatatcattaattgttgcgattttcaccatgggtattttccgtggattgaatatcaaagaaattggtgacgcaatgtctgaatcggttaaacaaattgctatgatgttgttaatcattggtggtggtggtgccttcaaacaagtattagttgatggtggtgtttctaagtatattggcgatttattcggacaaactaatttgtccccaattcttgttgcttggttaatcgctgctttacttcgcgtcagcctaggatcatctactgttgcttcgataacagcagccagtttagttacttcagttgtgtccaactcaagtgtgagtcctgtattagtagttttggcaattggtgctggaagtatatttgctgatcatgttaatgatgctggattctggatgataaaagaatattttggtttaacattgaaagaaacgttcttatcttggacgacattaaccagtgtcatctccgtttcgggtctgttatcgattctactcgtgtcatgttttatgtag

SEQ ID NO: 10203 - protein, 444 aa, Leuconostoc mesenteroides subsp. mesenteroides ATCC 8293
MPLLTVLIGVILLVFLITKFKLNTFLSLVITAFVVGLILGIPVSDISTSIETGIGGQLGHLAIIFGFGSMLGKLISDAGGGFRIAHQLIATFGKKRIQIAVIITSFIIGLALFFEVGLVVLLPIIFVIAREVNMPLLYLGIPMAATLNVAHGFLPPHPAPTAVSQVLNAPLGHVLLIGILVSIPTIIISGPVFNYFLHRVYPQVYKKDINISVLGEYKEFELKDTPKFGISVLTALLPVILISIATILSFVLPAKSVIYQIVTFIGAPDVAMLISLIVAIFTMGIFRGLNIKEIGDAMSESVKQIAMMLLIIGGGGAFKQVLVDGGVSKYIGDLFGQTNLSPILVAWLIAALLRVSLGSSTVASITAASLVTSVVSNSSVSPVLVVLAIGAGSIFADHVNDAGFWMIKEYFGLTLKETFLSWTTLTSVISVSGLLSILLVSCFM

SEQ ID NO: 10204 - DNA, 1344 bp, Solibacter usitatus Ellin6076
  CDS (1)..(1344): transl_table=11
atgcccgccaatgggacttacctaatctgcattaccgtagcgaccctggcctgccttcttctcctcatcctggtcggaaaactgcacgcctttctggctctcctgatttcgtcgatgttcatgggcctcgccgccggaatggccccggaaaaggttctcaagtccatccagaccggcttcggcgatgctctcggattcatcgcggtggtgatcggcctcggcgccatgatcggccgtttcctcgagtactccggcggcggccgcgcgctcgccgactggctgctcgtcaagttcggcaagaaccacgccgcatgggccgtgctcattgcctctttcctcgtcggactcccgatcttcttcgaggtcggattcatcatcctcatccccatcgtctggagcctcacccgcgagaccaagcgctccctgcttttctacgggctgccgatggccgccgcgctcaccatgacgcattccctggtgccgccccaccccgctcccgcggccgccgcgcagttgatggggggcgatctcgcccacaccatcatctacggcgtgctgatgtcgatcccgatgaccctgattgccggcatcgtgtatgccacctgggtggcgcgccgcatctatatccccgtccccgaaatcgcagcctcgatgaccctaaaatccgccgagtcacccggcgcgccgccgcccgtggccgtcgtcgtcctgctcctgttgctcccggtcacgctcaccttcggcgcgactatggccagcttgcgcaatattcccttccgcggagtcgcagtcttcctcgggcatccgtacaccgcgctcaccgtcaccaccctgatcgccctctactgcttcggcctgcgccgcggattgtcgcgcgaccaggtgctcaaaatggccacggactcgctgctccccgtcggcggactgatgtgcatcatcggcggcggcggcgcgctgaaacaggtgatcgtggattccggcgttggaacttacgccggtaagctgctgatgaccagcgcgatctcgccgctgatcgtggtctggctgatcgccgcctgcatgcgcctcgcgcagggctccgcgactgtcgccatcatcacggccgccggcatcgccgcgccgctggtcaagggactgcccggctactcgcccgacgagttgatcctcgccctctgctgcggcggctcggccttttcccaggtcagcgattcgggcttctggatggtcaccaattacttcggcaccaccgtcgcccagacgctgaagacctggaccaccatgaagatcatcgcctccctgctggggctcgccatcatgctcaccgcgcatgcgctgctacgatag

SEQ ID NO: 10205 - protein, 447 aa, Solibacter usitatus Ellin6076
MPANGTYLICITVATLACLLLLILVGKLHAFLALLISSMFMGLAAGMAPEKVLKSIQTGFGDALGFIAVVIGLGAMIGRFLEYSGGGRALADWLLVKFGKNHAAWAVLIASFLVGLPIFFEVGFIILIPIVWSLTRETKRSLLFYGLPMAAALTMTHSLVPPHPAPAAAAQLMGGDLAHTIIYGVLMSIPMTLIAGIVYATWVARRIYIPVPEIAASMTLKSAESPGAPPPVAVVVLLLLLPVTLTFGATMASLRNIPFRGVAVFLGHPYTALTVTTLIALYCFGLRRGLSRDQVLKMATDSLLPVGGLMCIIGGGGALKQVIVDSGVGTYAGKLLMTSAISPLIVVWLIAACMRLAQGSATVAIITAAGIAAPLVKGLPGYSPDELILALCCGGSAFSQVSDSGFWMVTNYFGTTVAQTLKTWTTMKIIASLLGLAIMLTAHALLR

SEQ ID NO: 10206 - DNA, 1446 bp, Mycobacterium smegmatis str. MC2 155
  CDS (1)..(1446): transl_table=11
gtggacgccattgatccggcatacggcaccaccacccttctgctgatcgcggcagccgcggtggcggtgctgctgttcctcatcatcaaggtgaagctgcacgcgttcgtcgccctggtactggtgagcctgttgaccgcactggccgccggtatccccgtggccgatgtgccaagcgccctgtcatccgggttctccagcacgctcggctccgtggccctgctcgtcggtttcggtgtcatgatcgggcgtcttctcgaaaccaccgggggtgcacaggttctcgccgacacgctcatcggccggttcggcgagaagcgggctcccctcgcgctcggcgtggcggcgttgctgttcggtttcccgatcttcttcgacgccggcctggtcgtcttcctgccgatcatcatgacggtggcccgccgtttcggcggatcgctgctgctgtacgcattccccgcagcgggcgcgttcgcggccatgcacgccctggtaccgccgcatcccggtccggtcgcggcggccgaattgctcggtgccaacatcggtctgacgttgatcgtgggcgtccccgtggcggtggtgtcgtggtacgtcggcgcgttcctggtgtcccaggtgatcggtcggcgcgtgcacatcgacattcccacgtcactgttcggcgagatcaacggtgggcgcgatatcgacgccacgggcacggaggccgacgccgacggggccggcgccacaggggcctcgaggaccgccacccgggccacgccgtcgttcctgaccgtcctgggtgtgctgttgctgcccttcgtgctgatctcctgcaacacggtggtcgccaccctgcagaccgcaggggtgatccccgaagaggccacgtgggcggagtacctcaaactgatcggcaccacgtcgatcgccctgctgatcaccgtcatcgtcgccaccctggtactcggattgcgcggcaggtcgatggccaccgtcaccgacatcctcgacaacgcactcggcccgatctgcgcgatcatcctgatcaccggcgcgggcggcatgttcgggggtgtgctgcgcaccagcggcatcggtgacgccctgagcggttcgctgtccgacctcggaatctcgctgatcctgcaggccttcctcatctccacgctgctgcgcgtcgcacagggttcggcgacggtcgcattgaccaccaccgcgggtctcctcagcgcagccgtcgccgccgccggactgagcagcctgcagctgaccgcgctggtgatggcgatcgccgcgggcgccacggtgctctcgcacgtcaacgactccggcttctggttggtcagccggttcttcggcatggatgtcaagaccacgctcaagacctggacgctgctggagacgacgctgggcgtgacagcgttcgtgatcagcctcggcctgtgggccataggctga

SEQ ID NO: 10207 - protein, 481 aa, Mycobacterium smegmatis str. MC2 155
MDAIDPAYGTTTLLLIAAAAVAVLLFLIIKVKLHAFVALVLVSLLTALAAGIPVADVPSALSSGFSSTLGSVALLVGFGVMIGRLLETTGGAQVLADTLIGRFGEKRAPLALGVAALLFGFPIFFDAGLVVFLPIIMTVARRFGGSLLLYAFPAAGAFAAMHALVPPHPGPVAAAELLGANIGLTLIVGVPVAVVSWYVGAFLVSQVIGRRVHIDIPTSLFGEINGGRDIDATGTEADADGAGATGASRTATRATPSFLTVLGVLLLPFVLISCNTVVATLQTAGVIPEEATWAEYLKLIGTTSIALLITVIVATLVLGLRGRSMATVTDILDNALGPICAIILITGAGGMFGGVLRTSGIGDALSGSLSDLGISLILQAFLISTLLRVAQGSATVALTTTAGLLSAAVAAAGLSSLQLTALVMAIAAGATVLSHVNDSGFWLVSRFFGMDVKTTLKTWTLLETTLGVTAFVISLGLWAIG

SEQ ID NO: 10208 - DNA, 1386 bp, Neisseria meningitidis FAM18
  CDS (1)..(1386): transl_table=11
atggacggctggacacagacgctgtccgcgcaaaccctgttgggcatttcggcggcggcaatcatcctcattctgattttaatcgtcaaattccgcatccacgcgctgctgacactggtcatcgtcagcctgctgacggctttggcaaccggtttgcccacaggcagcattgtcaacgacgtactggtcaaaaacttcggcggcacgctcggcggcgtggcgcttctggtcggcctgggcgcaatgctcggacgtttggtcgaaacatccggcggcgcacagtcgctggcggacgcgctgatccggatgttcggcgaaaaacgcgcaccgttcgcgctgggcgttgcctcgctgattttcggcttcccgattttcttcgatgccggactaatcgtcatgctgcccatcgtgttcgccaccgcacggcgcatgaaacaggacgtactgcccttcgcgcttgcctccatcggcgcattttccgtcatgcacgtcttcctgccgccccatccgggcccgattgccgcttccgaattttacggcgcgaacatcggccaagttttgattttgggtctgccgaccgccttcatcacatggtatttcagcggctatatgctcggcaaagtgttggggcgcaccatccatgttcccgttcccgaactgctcagcggcggcacgcaagacaacgacctgccgaaagaacctgccaaagcaggaacggtcgtcgccatcatgctgattcccatgctgctgattttcctgaataccggcgtatcggccctcatcagcgaaaaactcgtaagtgcggacgaaacctgggttcagacggcaaaaataatcggttcgacaccgatcgcccttctgatttccgtattggtcgcactgtttgtcttgggacgcaaacgcggcgaaagcggcagcgcgttggaaaaaaccgtggacggcgcactcgcccccgtctgttccgtgattctgattaccggcgcgggcggtatgttcggcggcgttttgcgcgcttccggcatcggcaaggcactcgccgacagcatggcggatttgggcattcccgtccttttgggctgtttccttgtcgccttggcactgcgtatcgcgcaaggttcggcaaccgtcgccctgaccaccgctgccgcgctgatggctcctgccgttgccgccgccggctttaccgactggcagctcgcctgtatcgtattggcaacggcggcaggttcggtcggttgcagccacttcaacgactccggcttctggctggtcggccgcctcttggacatggacgtaccgaccacgctgaaaacctggacggtcaaccaaaccctcatcgcactcatcggctttgccttgtccgcactgctgttctccatcgtctga

SEQ ID NO: 10209 - protein, 461 aa, Neisseria meningitidis FAM18
MDGWTQTLSAQTLLGISAAAIILILILIVKFRIHALLTLVIVSLLTALATGLPTGSIVNDVLVKNFGGTLGGVALLVGLGAMLGRLVETSGGAQSLADALIRMFGEKRAPFALGVASLIFGFPIFFDAGLIVMLPIVFATARRMKQDVLPFALASIGAFSVMHVFLPPHPGPIAASEFYGANIGQVLILGLPTAFITWYFSGYMLGKVLGRTIHVPVPELLSGGTQDNDLPKEPAKAGTVVAIMLIPMLLIFLNTGVSALISEKLVSADETWVQTAKIIGSTPIALLISVLVALFVLGRKRGESGSALEKTVDGALAPVCSVILITGAGGMFGGVLRASGIGKALADSMADLGIPVLLGCFLVALALRIAQGSATVALTTAAALMAPAVAAAGFTDWQLACIVLATAAGSVGCSHFNDSGFWLVGRLLDMDVPTTLKTWTVNQTLIALIGFALSALLFSIV

SEQ ID NO: 10210 - DNA, 1347 bp, Exiguobacterium sibiricum 255-15
  CDS (1)..(1347): transl_table=11
atgccattagtcattgttgctatcgggattattctgttactcgttttaattatggggttaaaattaaacacgttcgtttctttaatcatcgtctcgttcgtcgtcgctttactgcttggaatgccgcttgatcaaatcgtcacgacgattgaagccggtctcggcggcacgcttggtcacctcgccttaatcttcggacttggtgccatgctcgggaaattgattgccgatgcaggcggtgcgcaacggatcgcgatgacgcttgtcgcgaagtttggggaaaagaacatccaatgggctgtcgttgtcgcctcattcatcatcgggattgcgttattctttgaagtcggcttggtgttgttgattccaatcgtcttcgccatctcacgtcagttacgcgtctcgatcttgtatctcgggattccgatggttgctgccctttccgtcacacacggctttcttccgcctcacccgggcccgaccgttattgccggagaatacggagctgaccttggtcaagttctcttatacggctttattgtagccgtaccgaccgtcatcatcgccggtccgatctttacgaaaatcgcgaaacgaatcgttccggattcattcaagaaaaccggcaacatcgcttcactcggggaacaaaaagaatttaatctcgacgagacaccaggattcggtatcagtgtcttcacagcgatgctgcctgtcctcctgatgtcgatcgcgacgattttaacgttattgcaaaaaacgcttggttgggaaagtaacagtgttttatctgccgttcaattcatcggaaacgcatcgacggcgatgctgatttccttgcttttcgctatctacacgatgggactggcgcgtcagattcccattaaaaccgtcatggattcttgtacgacggccatcacacaaatcggaatgatgctactgatcatcggcggcggcggtgcctttaagcaggtcctgattgacggtggtgtcggtaaattcgtcgctcagatgtttgaagatacgacattatcaccgattttactggcgtggatcatcgcagccatcttacggatttcacttggttcggcaaccgtcgcttcactgacgacagccggtctcgtcattccgttgctcggtcaatcggatgtcaatctggcgctcgtcgttctcgcaacaggagccggcagtttgatcgcttcacacgtcaacgacgccggattctggatgtttaaagagtatttcggattaaccatgaaagaaacttttgcgacgtggaccttgcttgagacaatcatttccgtcttcggacttggattcgtccttctgctcagtctcgtcgtctaa

SEQ ID NO: 10211 - protein, 448 aa, Exiguobacterium sibiricum 255-15
MPLVIVAIGIILLLVLIMGLKLNTFVSLIIVSFVVALLLGMPLDQIVTTIEAGLGGTLGHLALIFGLGAMLGKLIADAGGAQRIAMTLVAKFGEKNIQWAVVVASFIIGIALFFEVGLVLLIPIVFAISRQLRVSILYLGIPMVAALSVTHGFLPPHPGPTVIAGEYGADLGQVLLYGFIVAVPTVIIAGPIFTKIAKRIVPDSFKKTGNIASLGEQKEFNLDETPGFGISVFTAMLPVLLMSIATILTLLQKTLGWESNSVLSAVQFIGNASTAMLISLLFAIYTMGLARQIPIKTVMDSCTTAITQIGMMLLIIGGGGAFKQVLIDGGVGKFVAQMFEDTTLSPILLAWIIAAILRISLGSATVASLTTAGLVIPLLGQSDVNLALVVLATGAGSLIASHVNDAGFWMFKEYFGLTMKETFATWTLLETIISVFGLGFVLLLSLVV

SEQ ID NO: 10212 - DNA, 1365 bp, Escherichia coli B
  CDS (1)..(1365): transl_table=11
atgtccacaattacattgttatgcattgcgttaactggcgtaatcatgctgttgctgctggtcatcaaggcaaaggtacaaccattcgttgctctgctcctcgtcagcctgttagtcgcacttgcggcgggtataccggcgggcgaagtgggtaaagtgatgatcgccgggatgggcggtgtgcttggttccgtcactattattattggtctgggcgctatgctggggcgtatgatcgaacactctggtggtgcagagtcactggctaattatttcagtcgcaagttaggtgacaaacgaactatcgctgcgctgactctggcagcgttcttcctcggtattcccgtcttctttgatgtcggctttattattcttgcgccaatcatttacggttttgccaaggttgccaaaatatcgccactcaaatttggcctgcctgtcgctggggtcatgctcactgttcacgtggcggtaccgccgcatccaggccctgtcgccgcagcggggttactccacgcagacatcggctggctaaccatcatcggtattgcgatttctattcccgtaggggttgttggctactttgcagcgaaaataatcaataagcgccaatatgcgatgtcagtagaagtactggaacagatgcaactggctccggccagtgaggaaggcgcgacaaaattaagcgataaaataaatccaccgggcgtcgcgctggtcacctcgctaattgttattcctatcgcgattatcatggcgggtacggtttccgcaacactgatgccgccttcgcatcccctgcttggtacgctacagctgatcggctcaccaatggtagctctaatgattgcgctggtgctggcattctggttattggctttacgtcgcggctggagcttacaacacaccagcgacattatgggctcagcccttcccactgcggcggtagtgattttggttactggtgctggaggggtatttggcaaagtgctggtggaatcgggcgtcggcaaagcccttgccaacatgctacaaatgattgacctgcctctgttaccagccgcatttattatttcactggcgctgcgtgcatcgcaggggtcagcaaccgtagcaatcctgacaaccggcgggttactctcagaagcggtgatgggattgaatccgattcagtgcgtattggtgacgctggcagcctgctttggtgggcttggcgcgtcacatattaatgactcagggttctggattgtgaccaaatatctggggttgtcggtagcagacggtctgaaaacctggacagtgttaacgaccattctcggttttaccggattcttaattacctggtgcgtatgggcggtaatttga

SEQ ID NO: 10213 - protein, 454 aa, Escherichia coli B
MSTITLLCIALTGVIMLLLLVIKAKVQPFVALLLVSLLVALAAGIPAGEVGKVMIAGMGGVLGSVTIIIGLGAMLGRMIEHSGGAESLANYFSRKLGDKRTIAALTLAAFFLGIPVFFDVGFIILAPIIYGFAKVAKISPLKFGLPVAGVMLTVHVAVPPHPGPVAAAGLLHADIGWLTIIGIAISIPVGVVGYFAAKIINKRQYAMSVEVLEQMQLAPASEEGATKLSDKINPPGVALVTSLIVIPIAIIMAGTVSATLMPPSHPLLGTLQLIGSPMVALMIALVLAFWLLALRRGWSLQHTSDIMGSALPTAAVVILVTGAGGVFGKVLVESGVGKALANMLQMIDLPLLPAAFIISLALRASQGSATVAILTTGGLLSEAVMGLNPIQCVLVTLAACFGGLGASHINDSGFWIVTKYLGLSVADGLKTWTVLTTILGFTGFLITWCVWAVI

SEQ ID NO: 10214 - DNA, 1404 bp, Pseudomonas putida GB-1
  CDS (1)..(1404): transl_table=11
atggttgcaaaccaacaagaagctcgcacggaagcgatcagcgatagagataactacacgatgactccaacgttctcattaatcgttctgggcactgcaatactgctgatcgtggtcatgatcagcaagctcaaggtccaccccttcctggcactgctggccgcaagcctggtggtgggcattggtaccggcatgccgccgacggccatggttgccgcgttcgaaaaaggcatgggcagcacgctgggctttcttgccggcatcatcggcctgggcagtatcctcggcaaactgctggaagagtcgggtggggccaggcgcatcgccaccacgctgctgaacctgttgggtgaacgcaatgcttcatgggccatgatgctggtgggcttcatcgctggcatcccggtatttttcgaggtcggcttcgtgctgctcattccgctgatctacgtggttgcccggcaaacccgcatcagcatgctgtacctcggcgtcccgctggccacctcgctgatggtggtgcactgcattctgccgccacacccagctgctacggcgattaccggcatgctcaatgccgatatcggcacggtcatcctctatggcctgatcgttggcttgcccactgccatcatcgccggcccggtctgggtacgcttcgcctgcaagcgcggcgcaacacaagcgcaagataccttcctttcggcacgtaccgaggcccaggtcgatgaccagccgctgcctgctttcggcattaccctcgccaccgtactgctgccgttgctgctgatggtcggcaaaaccttggccgtcatggtgctggcaaagggctccacgctgtacgagtgggtggccttcgttggcaacccactgatcgccctggcgctgtcggttatgttcggctactgggcactgggcctgcgccgcggcctggacatggcgcagttgctcaacctgacccagcgctgcttcccgcccctggccggtattttgctgattatcggtgccggcggcgccttcaacgacatgctggtcggtagcggcatcggcaaggcgctggctgacgtgctcaaccagacccagctcaacccgatcatcctcgcctggctgatcgctgggatcatgcacttcgcggtcggttcggccacggtggcaatgatcagcgcagccggcatggtcatgccgatcctggaccaacaccccgaatacaaccgggaaatcctggtgatcgccatcggtgcaggcgccatcggctggacacacattaccgattcggcgttctgggtggtgaaggagtatctggggctgtcactcagcgatgcgttgaaaaaattcactgcggcgacagtgctggcctcggtgatcgccttgtgcctgaccctgctcctttcaaaaattgtctga

SEQ ID NO: 10215 - protein, 467 aa, Pseudomonas putida GB-1
MVANQQEARTEAISDRDNYTMTPTFSLIVLGTAILLIVVMISKLKVHPFLALLAASLVVGIGTGMPPTAMVAAFEKGMGSTLGFLAGIIGLGSILGKLLEESGGARRIATTLLNLLGERNASWAMMLVGFIAGIPVFFEVGFVLLIPLIYVVARQTRISMLYLGVPLATSLMVVHCILPPHPAATAITGMLNADIGTVILYGLIVGLPTAIIAGPVWVRFACKRGATQAQDTFLSARTEAQVDDQPLPAFGITLATVLLPLLLMVGKTLAVMVLAKGSTLYEWVAFVGNPLIALALSVMFGYWALGLRRGLDMAQLLNLTQRCFPPLAGILLIIGAGGAFNDMLVGSGIGKALADVLNQTQLNPIILAWLIAGIMHFAVGSATVAMISAAGMVMPILDQHPEYNREILVIAIGAGAIGWTHITDSAFWVVKEYLGLSLSDALKKFTAATVLASVIALCLTLLLSKIV

SEQ ID NO: 10216 - DNA, 1386 bp, Pseudomonas putida GB-1
  CDS (1)..(1386): transl_table=11
atgacccccttggatatacagctgctactgaccgctctggtcagtgtcctggtgctggtggcactcatcgtgtcgcgcctgaagatgcacccgctgctggccttgctggtggtgtccattggggtgggcttcgctacccgcatggagccaggcagcatcgtctcccacttgcttaccggcgctggaaaaaccctgggggccgtcggggtggtgattgcccttggcgcgatgctcggcaaaattctggctgacgctggcgtcaccgagcaggtcgctgatgtcatcctcaagcgcacctcggaccgcatgattccgtgggccatgatgttggttgccttcgtcattggcatccccatgtttttcgaagtgggcctggtgatcatgctgccgctgattttcagcgtggcgcgcaagctggaaagcaaggcccgcttcaagggctctgcatacgtgtatgtaggcgtgccggtgatttcggcgctggctgccatgcacggcatggtaccgccgcaccctggccccctgaccgccatcgcggtactcaagacctcggttgggcccaccatgctttacggcttcctggcggctatcccggcaatgatcctgggcggcccgctgtatggcatgttcatttcgccgcgcatgagcactcggcctgatcaggctttgctggaccagttcaccctggctgaaaaagccgacgatcaaccccgccccggcgtagcgatcggcatgctggccgcgttgctgccggcgattctgatgctggtgcatgccgtcgccgagatgctgctacccaagggcaacccgttgctggagctggccagtttcctcggcaacccgctgatcgccatgttgctgggcgtgctgttcgccggcgccagcctggtactggcgcgcggcggtgacgccgaacacctgcgcgatgcactgggcaaaagcctcaagcctatcgcctcgatcatcatgatcatcgccggcggcggggcttttcaggagatgctgaccagcgccaaggtgggtgatgccattgtgcacctgactcagcaatcggccttcccgcccttgatgctggggtggttgatcgcgatgttgctttcggtgtctaccggctccgccacggtaggtatcgttggggctgccggcttgctggcaccgctggcgggtgccgaccccagcctcaacctgccgttgctggccttgtccatcggctgtggctcgctgttcttcaactatgcgaaccatgcagggttctggatggtgaaagagtcctttgggatgaccatgggcgaagccaccaggaccatctcggtggtgcagtccatcgtggcggtggtcgggttgattgtggtgctggtcttgaatgcggcaattactgtgagttga

SEQ ID NO: 10217 - protein, 461 aa, Pseudomonas putida GB-1
MTPLDIQLLLTALVSVLVLVALIVSRLKMHPLLALLVVSIGVGFATRMEPGSIVSHLLTGAGKTLGAVGVVIALGAMLGKILADAGVTEQVADVILKRTSDRMIPWAMMLVAFVIGIPMFFEVGLVIMLPLIFSVARKLESKARFKGSAYVYVGVPVISALAAMHGMVPPHPGPLTAIAVLKTSVGPTMLYGFLAAIPAMILGGPLYGMFISPRMSTRPDQALLDQFTLAEKADDQPRPGVAIGMLAALLPAILMLVHAVAEMLLPKGNPLLELASFLGNPLIAMLLGVLFAGASLVLARGGDAEHLRDALGKSLKPIASIIMIIAGGGAFQEMLTSAKVGDAIVHLTQQSAFPPLMLGWLIAMLLSVSTGSATVGIVGAAGLLAPLAGADPSLNLPLLALSIGCGSLFFNYANHAGFWMVKESFGMTMGEATRTISVVQSIVAVVGLIVVLVLNAAITVS

SEQ ID NO: 10218 - DNA, 1344 bp, Marinobacter sp. ELB17
  CDS (1)..(1344): transl_table=11
atgcacatggtttttattttaatcgctcttattgcgttcattgtgttcgcaacgagcaaattgcgcctcaaccctttcattacacttttgctggcatcgttcattgccgcgttcgcatttggcctgccgctcgatgccatcgaatcaacgattcgcggtggttttggtaaaattctcggctacatcggcctggttatcgttttgggtaccatcatcggtgtcattcttgagcgcaccggtgccgctattgtgatggctgagacgatcattaaatgtttgggtaaaaaattccctaccatgacgatgtccatcgttggttttattgtgtctattccggtgttttgtgattccggttttgtcattctcaacagcctgaagcgctccatggcgagaacccttagcgtatcccccgtcgcaatgacggtggcactttctaccggtctatttgcaacccacacccttgtaccacccacgcccggcccgattgcggccgcaggcaacctggggttggaaaacaacttggggctggttatcggcgtcggccttgttttcgccataatcgcggcgatggcgggtttggtttgggcctatttctcacgaaacctgcccagtacagaactggatctaacagaagaagcgtttgaggaaggtaaagagcattacggtgaactgcctggcccatggaaagcctttgctcctatttttgtacccattgcccttatttgtttgggctcagtagccagttacccaaccgccccgctgggtgatgggtttctttatgaagcgctgaattttcttggtaagccgctaaatgctctgttgattggccttgggtttgcagtactgctgattcaaggtaatgagaaactcaaaggatttgcccgtcacaccgaaaaaggtctggttgtctcggcaccgattattctgattaccggtgcgggtggcgcattcggtgctgtgctggccgcgacaccgctgggtgatttccttggccagaacctgtctacattgggcttgggggttatcatgcctttcattgtggccgctgcgctcaaatcggcacaaggttcttcaaccgtcgccctggttaccgcttctgcgctggttgccccgttgttgccgcaattgggattggactcagatatgggccgcgtactaacggttatggccgttggtgctggcgcaatgaccgtctcccacgccaacgacagctatttttgggtggtatcccagttcagtaaaatggacgttgcaacggcgtatcgctcacacacagcggcgacactttttatgggcctggtaacaattactgccgtgtggctagcatccctggcagctctgtaa

SEQ ID NO: 10219 - protein, 447 aa, Marinobacter sp. ELB17
MHMVFILIALIAFIVFATSKLRLNPFITLLLASFIAAFAFGLPLDAIESTIRGGFGKILGYIGLVIVLGTIIGVILERTGAAIVMAETIIKCLGKKFPTMTMSIVGFIVSIPVFCDSGFVILNSLKRSMARTLSVSPVAMTVALSTGLFATHTLVPPTPGPIAAAGNLGLENNLGLVIGVGLVFAIIAAMAGLVWAYFSRNLPSTELDLTEEAFEEGKEHYGELPGPWKAFAPIFVPIALICLGSVASYPTAPLGDGFLYEALNFLGKPLNALLIGLGFAVLLIQGNEKLKGFARHTEKGLVVSAPIILITGAGGAFGAVLAATPLGDFLGQNLSTLGLGVIMPFIVAAALKSAQGSSTVALVTASALVAPLLPQLGLDSDMGRVLTVMAVGAGAMTVSHANDSYFWVVSQFSKMDVATAYRSHTAATLFMGLVTITAVWLASLAAL

SEQ ID NO: 10220 - DNA, 1395 bp, Enterobacter sakazakii
  CDS (1)..(1395): transl_table=11
atgttgaggataataacgatgacagaaaccactttcgcttatagcgccggtacgctgcttggcattgctgccggtgccgtcgtactgctgctggtacttatcatgcgctttaaagtgcatgcttttcttgcgcttaccctggtcagtatcgtggtggcgctgttgaccaaagtgccgtttgataaagtcgtgcctacgctgctgaccggttttggcagtacgcttgcgggcgttgcgctgctggtgggcatcggcgcgatgattggccgtctgctggaagtgtccggcggcgcgaaagtgctggccgatacgctgattaacaaattcggtgaacaccgcgcgcccttcgcgctcggcgtcgcctcgctgctgtttggcttccctatcttctttgacgcgggtcttgtcgtcatgctgccgattatcttcagcgtggcgaaacgctttggcggctcgacgctgaaatacgccttcccggcggcgggcgcgtttgcggccatgcatgcgctggtgccgccgcatccgggcccggttgccgcgagcgaactgctgggggcgaatatcggtctgctggtgattgtcgggctgattatcgcgatcccgacctggtattttggcggctatctgtatggtcagtacgccggtaaaaaattcgacattaagctgccctcttctttccttggcgaagtggacgccgatccgacgcaccgcccgccgtcattcggcatggtgatcaccatcctgctgctgccgctgctgctgattttccttgataccggcctcaataccgccaaagtgctgggctgggtcagcgccgataacagcgtggcgaacttcctgcgtatgctcggtaaaaccccggtcgcgctgctgattaccgtctttttcgcgctgatggtgttcagccgcaaccacagccgccagcatctggagaaaatttgcgacggcgcgcttggccctatctgcggcatcattctggtgaccggcgcaggcggcatgttcggcggcgtgctgcgcgccagcggcatcggcgacgcgctggcgggcgtgctctcagacaccggcatgccggtgattctcgcggcgtttgttatctccaccgcgctgcgcgtggcgcagggctcggcgacggtcgcgctgacgaccaccgccgcgctggtcgcgccgatggtgcaggcgacgccgggcttaagccagttcgacctttgctttattgttatcgccatcgcgggcggcgcgacggtgctctcacacgtcaacgactccggtttctggctagtgggccgtttccttgaaatggacgagaaaaccacgctgaaaacctggaccgtgatggaaaccctgctgggcaccatcgccttcctgctggcagccgtggggagcattctgctttaa

SEQ ID NO: 10221 - protein, 464 aa, Enterobacter sakazakii
MLRIITMTETTFAYSAGTLLGIAAGAVVLLLVLIMRFKVHAFLALTLVSIVVALLTKVPFDKVVPTLLTGFGSTLAGVALLVGIGAMIGRLLEVSGGAKVLADTLINKFGEHRAPFALGVASLLFGFPIFFDAGLVVMLPIIFSVAKRFGGSTLKYAFPAAGAFAAMHALVPPHPGPVAASELLGANIGLLVIVGLIIAIPTWYFGGYLYGQYAGKKFDIKLPSSFLGEVDADPTHRPPSFGMVITILLLPLLLIFLDTGLNTAKVLGWVSADNSVANFLRMLGKTPVALLITVFFALMVFSRNHSRQHLEKICDGALGPICGIILVTGAGGMFGGVLRASGIGDALAGVLSDTGMPVILAAFVISTALRVAQGSATVALTTTAALVAPMVQATPGLSQFDLCFIVIAIAGGATVLSHVNDSGFWLVGRFLEMDEKTTLKTWTVMETLLGTIAFLLAAVGSILL

SEQ ID NO: 10222 - DNA, 1320 bp, Escherichia coli B
  CDS (1)..(1320): transl_table=11
atgccattaatcattattgcggcaggcgtcgcgctgcttcttatcctgatgatcgtctttaaagttaacggctttattgccctcgttctggtagctgccgtcgtcggatttgccgaagggatggatgcacaggccgtcctgcactctatacaaaatggtatcggcagcacgctcggcgggctggcaatgatcctcggtttcggggccatgttaggcaagctgatttctgatacgggtgcggcacaacgtatcgccactacgctgattgctacttttggtaaaaaacgcgtgcaatgggcgctagtgatcaccggtctggttgtgggcctcgccatgttttttgaagtgggttttgtcctgctgttgccgttggtatttaccatcgtagcatcatcaggattacccctgttgtatgttggcgtaccaatggtagcagcgctctctgtaacccactgttttctgccgccacatccagggcctactgccatcgcgactatctttgaggctaatctcggaacgactttactgtatggatttatcattaccattccgacagttattgtcgcaggaccgctgttttctaaactgctaactcgctttgagaaagcaccaccggaaggcttatttaatcctcatctgtttagcgaagaggagatgccctccttctggaacagtattttcgctgccgtgatcccggtcatcctgatggctatcgccgccgtttgtgaaattacgttaccgaaaactaacaccgtgcgcctcttctttgaatttgtcggtaaccctgccgttgcgctgtttattgccattgttattgcgattttcacactgggccgacgtaatggacgcaccatcgagcaaatcatggatatcattggggattctataggcgctatcgcgatgattgtgtttattatcgctggcggcggcgcgtttaagcaggtattagtagatagcggtgtcgggcactatatttcacacttaatgaccggaactacactttcgccgttattgatgtgctggactgttgcggcgctgttgcgtatcgctctgggctctgccaccgtcgcggccattaccaccgcgggtgtggtgttgccgattatcaacgttacccatgccgatcccgctttaatggtactggcaaccggtgcgggcagcgtgatcgcgtcacacgtaaacgaccctggcttctggctatttaaagggtattttaatctgacggttggtgaaacgttgcgtacctggacggtgatggaaacccttatttctattatgggtttgctgggcgtgttagccattaacgccgtattgcactga

SEQ ID NO: 10223 - protein, 439 aa, Escherichia coli B
MPLIIIAAGVALLLILMIVFKVNGFIALVLVAAVVGFAEGMDAQAVLHSIQNGIGSTLGGLAMILGFGAMLGKLISDTGAAQRIATTLIATFGKKRVQWALVITGLVVGLAMFFEVGFVLLLPLVFTIVASSGLPLLYVGVPMVAALSVTHCFLPPHPGPTAIATIFEANLGTTLLYGFIITIPTVIVAGPLFSKLLTRFEKAPPEGLFNPHLFSEEEMPSFWNSIFAAVIPVILMAIAAVCEITLPKTNTVRLFFEFVGNPAVALFIAIVIAIFTLGRRNGRTIEQIMDIIGDSIGAIAMIVFIIAGGGAFKQVLVDSGVGHYISHLMTGTTLSPLLMCWTVAALLRIALGSATVAAITTAGVVLPIINVTHADPALMVLATGAGSVIASHVNDPGFWLFKGYFNLTVGETLRTWTVMETLISIMGLLGVLAINAVLH

SEQ ID NO: 10224 - DNA, 1365 bp, Escherichia coli
  CDS (1)..(1365): transl_table=11
atgtccacaattacattgttatgcattgcgttagctggcgtaatcatgctgttgctgctggtcatcaaggcaaaggtacaaccattcgttgctctgctcctcgtcagcctgttagtcgcacttgcggcgggtataccggcgggcgaagtgggtaaagtgatgatcgccgggatgggcggtgtgcttggttccgtcactattattattggtctgggcgctatgctggggcgtatgatcgaacactctggtggtgcagagtcactggctaattatttcagtcgcaagttaggtgacaaacgaactatcgctgcgctgactctggcagcgttcttcctcggtattcccgtcttctttgatgtcggctttattattcttgcgccaatcatttacggttttgccaaggttgccaaaatatcgccactcaaatttggcctgcctgtcgctggaatcatgctaactgttcatgtggcggtaccgccgcatccaggccctgtcgccgcagcggggttactccacgcagacatcggctggctaaccatcatcggtattgcgatttctattcccgtagggattgttggctactttgcagcgaaaataatcaatacgcgccaatatgcgatgtcggtggaagtactggaacagatgcaactggctccggccagtgaggaaggcgcaacaaaattaagcgataaaataaatccaccgggcgtcgcgctggtcacctcgctaattgttattcctatcgcgattatcatggcgggtacggtttccgcaacactgatgccgccttcgcatcccctgcttggtacgctacagctgatcggctcaccaatggtagctctaatgattgcgctggtgctggcattctggttattggctttacgtcgcggctggagcttacaacacaccagcgacattatgggctcagcccttcccactgcggcggtagtgattttggttactggtgctggaggggtatttggcaaagtgctggtggaatcgggcgtcggcaaagcccttgccaatatgctacaaatgattgacctgcctctgttaccagccgcatttattatttcactggctctgcgtgcatcgcaggggtcagcaaccgtagcaatcctgacaaccggcgggttactctcagaagcggtgatgggattgaatccgattcagtgcgtattggtgacgctggcagcctgctttggtgggcttggcgcgtcacatattaatgactcagggttctggattgtgaccaaatatctggggttgtcggtagcagacggtctgaaaacctggacagtgttaacgaccattctcggttttaccggattcttaattacctggtgcgtatgggcggtaatttga

SEQ ID NO: 10225 - protein, 454 aa, Escherichia coli
MSTITLLCIALAGVIMLLLLVIKAKVQPFVALLLVSLLVALAAGIPAGEVGKVMIAGMGGVLGSVTIIIGLGAMLGRMIEHSGGAESLANYFSRKLGDKRTIAALTLAAFFLGIPVFFDVGFIILAPIIYGFAKVAKISPLKFGLPVAGIMLTVHVAVPPHPGPVAAAGLLHADIGWLTIIGIAISIPVGIVGYFAAKIINTRQYAMSVEVLEQMQLAPASEEGATKLSDKINPPGVALVTSLIVIPIAIIMAGTVSATLMPPSHPLLGTLQLIGSPMVALMIALVLAFWLLALRRGWSLQHTSDIMGSALPTAAVVILVTGAGGVFGKVLVESGVGKALANMLQMIDLPLLPAAFIISLALRASQGSATVAILTTGGLLSEAVMGLNPIQCVLVTLAACFGGLGASHINDSGFWIVTKYLGLSVADGLKTWTVLTTILGFTGFLITWCVWAVI

SEQ ID NO: 10226 - DNA, 1365 bp, Escherichia coli
  CDS (1)..(1365): transl_table=11
atgtccacaattacattgttatgcattgcgttagctggcgtaatcatgctgttgctactggtcatcaaggcaaaggtacaaccattcgttgctctgctcctcgtcagcctgttagtcgcacttgcggcgggtataccggcgggcgaagtgggtaaagtgatgatcgccgggatgggcggtgtgcttggttccgtcactattattattggtctgggcgctatgctggggcgtatgatcgaacactctggtggtgcagagtcactggctaattatttcagtcgcaagctaggtgacaaacgaactatcgctgcgctgactctggcagcgttcttcctcggtattcccgtcttctttgatgtcggctttattattcttgcgccaatcatttacggttttgccaaggttgccaaaatatcaccactcaaatttggcctgcctgtcgctgggatcatgctcactgttcacgtggcggtaccgccgcatccaggccctgtcgccgcagcggggttactccacgcagacatcggctggctaaccatcatcggtattgcgatttctattcccgtagggattgttggctactttgcagcgaaaataatcaataagcgccaatatgcgatgtcggtcgaggtactggaacagatgcaactggctccggccagtgaggaaggcgcgacaaaattaagcgataaaataaatccaccgggcgtcgcgctggtcacctcgctaattgttattcctatcgcgattatcatggcgggtacggtttccgcaacactgatgccgccttcgcatcccctgcttggtacgctacagctgatcggctcaccaatggtagctctaatgattgcgctggtgctggcattctggttattggctttacgtcgcggctggagcttacaacacaccagcgacattatgggctcagcccttcccactgcggcggtagtgattttggttactggtgctggaggggtatttggcaaagtgctggtggaatcgggcgtcggtaaagcccttgccaacatgttacaaatgattgacctgcctctgttaccagccgcatttattatttcactggcgctgcgtgcatcgcaggggtcagcaaccgtagcaatcctgacaaccggcgggttactctcagaagcggtgatgggattgaatccaattcagtgcgtattggtgacgctggcagcctgctttggtgggcttggcgcgtcacatattaatgactcagggttctggattgtgaccaaatatctggggttgtcggtagcagacgggctgaaaacctggacagtgttaacgaccattctcggttttaccggattcttaattacctggtgcgtatgggcggtaatttga

SEQ ID NO: 10227 - protein, 454 aa, Escherichia coli
MSTITLLCIALAGVIMLLLLVIKAKVQPFVALLLVSLLVALAAGIPAGEVGKVMIAGMGGVLGSVTIIIGLGAMLGRMIEHSGGAESLANYFSRKLGDKRTIAALTLAAFFLGIPVFFDVGFIILAPIIYGFAKVAKISPLKFGLPVAGIMLTVHVAVPPHPGPVAAAGLLHADIGWLTIIGIAISIPVGIVGYFAAKIINKRQYAMSVEVLEQMQLAPASEEGATKLSDKINPPGVALVTSLIVIPIAIIMAGTVSATLMPPSHPLLGTLQLIGSPMVALMIALVLAFWLLALRRGWSLQHTSDIMGSALPTAAVVILVTGAGGVFGKVLVESGVGKALANMLQMIDLPLLPAAFIISLALRASQGSATVAILTTGGLLSEAVMGLNPIQCVLVTLAACFGGLGASHINDSGFWIVTKYLGLSVADGLKTWTVLTTILGFTGFLITWCVWAVI

SEQ ID NO: 10228 - DNA, 1338 bp, Escherichia coli
  CDS (1)..(1338): transl_table=11
atgcactctcaaatctgggttgtgagcacgctgcttatcagcatcgtgttaattgtactgaccatcgtgaagttcaaattccacccgtttctggcgctgttgctggccagcttcttcgtgggaacgatgatgggcatggggccactggatatggtaaatgctattgaaagtggaattggcggaacgctggggttcctcgcagcggttatcggccttggcacgatactgggaaaaatgatggaagtatccggggccgcagaaagaattggtctgacacttcaacgctgccgctggctttcagttgatgtcattatggtgctggttggcctgatttgtggcatcacgctgtttgttgaagtgggcgtcgtgctattgattcctctggctttttcaattgccaaaaaaaccaatacctcattattaaagcttgccattccgctatgtaccgcattgatggcagtgcactgcgtggttcctccacatccggctgctttatatgttgccaataagctgggcgcagatatcggttcggtgatcgtctacggtttgctggttgggctgatggcatcactgatcggtggcccacttttccttaaatttctgggtcaacgactgccctttaaacctgtacccacagagtttgcagatctcaaagttcgcgatgaaaaaacactaccgtcattaggcgcaacgttattcaccatactgctacccattgcgctgatgttggttaaaacgattgccgaattgaatatggcgcgtgagagtggtttgtatatcttggttgagtttattggcaaccctatcactgccatgtttatcgccgtgtttgtcgcctattatgtgttgggtatacgccagcatatgagcatggggacgatgctcacacatacggaaaatggcttcggttctattgctaatattttgctgattatcggggccggaggcgcattcaacgccattttaaaaagcagcagtctcgctgatacgctggcagttattctctccaatatgcatatgcacccgattcttctggcctggttagtggctcttattctgcatgcggcagtgggctccgctaccgtggcaatgatgggggcaacggcaattgttgcacccatgctgccgctgtatcccgacatcagcccggaaattattgcgattgctatcggttcaggtgcaattggctgcactatcgttacggactcgcttttctggctagtgaagcaatattgcggcgctacgctcaatgaaacatttaaatactatacgacagcgacatttatcgcttcagtcgtcgctctggcgggcacattcctgctgtcatttatcatctaa

SEQ ID NO: 10229 - protein, 445 aa, Escherichia coli
MHSQIWVVSTLLISIVLIVLTIVKFKFHPFLALLLASFFVGTMMGMGPLDMVNAIESGIGGTLGFLAAVIGLGTILGKMMEVSGAAERIGLTLQRCRWLSVDVIMVLVGLICGITLFVEVGVVLLIPLAFSIAKKTNTSLLKLAIPLCTALMAVHCVVPPHPAALYVANKLGADIGSVIVYGLLVGLMASLIGGPLFLKFLGQRLPFKPVPTEFADLKVRDEKTLPSLGATLFTILLPIALMLVKTIAELNMARESGLYILVEFIGNPITAMFIAVFVAYYVLGIRQHMSMGTMLTHTENGFGSIANILLIIGAGGAFNAILKSSSLADTLAVILSNMHMHPILLAWLVALILHAAVGSATVAMMGATAIVAPMLPLYPDISPEIIAIAIGSGAIGCTIVTDSLFWLVKQYCGATLNETFKYYTTATFIASVVALAGTFLLSFII

SEQ ID NO: 10230 - DNA, 1347 bp, Bacillus licheniformis
  CDS (1)..(1347): transl_table=11
atgccattactgatcgtagcaatcgggattgtggcattattgcttttgattatggggttaaaactgaatacgtttgtttccttgattatcgtatcgttcggggttgcattggcgcttggaatgccgcttgacgacatcgtcaaaacgattgaagaaggccttggcggaacgctcggccatatcgcattgatcttcgggctcggcgccatgctgggcaggctgatcgcggattcagggggcgctcagcgcattgcgatgaccctcgtcaacaaattcggagaagaaaacatccaatgggcggtcgtcatcgcctcctttatcatcggggtagcattattcttcgaagtcgcattggtattattgattccaattgtattcgccatttcaaaagaattggagatatctatttcataccttggaattccaatgacggcggccttatccgtcacacacggcttcctgcccccgcatccgggaccgacggctatcgcgggagagctcggcgccaatatcggggaagtgctgctctacggtatcattgttgcaattccaaccgttcttttggccggacctttatttacgaaactggcgaaaaaaatcgtcccgcaatcatttgagaaaatgggcagcatcgcttcactcggtgagcagaaaacgttcaagcttgaagagacgcccggcttcggcatcagcgtcttcacagctatgcttccggtcattatcatgtctatttcgactgttattacgcttattcaagaaacgatgggccttgcagacaacagcctgctggcagcggttcgtttaatcgggaatgcctcgacttcgatggtcatctccctgttggtcgcgatctatacgatggggatcgccagaaagatcccgatcaaacaagtgatggattcctgttcaaccgccattacacaaatcggaatgatgctcttgatcatcgggggcggcggcgccttcaaacaagtcttgatcaatggcggagtaggcgactatgtagctgaattattcaaaggaacagccatgtcgccgatcttgctcgcctgggtcatcgccgcaattctgcgcatctccttaggatccgcgacagttgctgcattaagcacaaccggactcgttcttccgatgctcggacaaagcgatgtcaatcttgcgctggttgtgcttgcaacaggggccggaagtgtaatcgcttcccatgtcaatgacgcaggcttctggatgttcaaagagtatttcggactaagcatgaaagagacatttgccacctggacactgcttgaaaccattatcgcggtggccggattaggatttactttattgttaagcctatttgtataa

SEQ ID NO: 10231 - protein, 448 aa, Bacillus licheniformis
MPLLIVAIGIVALLLLIMGLKLNTFVSLIIVSFGVALALGMPLDDIVKTIEEGLGGTLGHIALIFGLGAMLGRLIADSGGAQRIAMTLVNKFGEENIQWAVVIASFIIGVALFFEVALVLLIPIVFAISKELEISISYLGIPMTAALSVTHGFLPPHPGPTAIAGELGANIGEVLLYGIIVAIPTVLLAGPLFTKLAKKIVPQSFEKMGSIASLGEQKTFKLEETPGFGISVFTAMLPVIIMSISTVITLIQETMGLADNSLLAAVRLIGNASTSMVISLLVAIYTMGIARKIPIKQVMDSCSTAITQIGMMLLIIGGGGAFKQVLINGGVGDYVAELFKGTAMSPILLAWVIAAILRISLGSATVAALSTTGLVLPMLGQSDVNLALVVLATGAGSVIASHVNDAGFWMFKEYFGLSMKETFATWTLLETIIAVAGLGFTLLLSLFV

SEQ ID NO: 10232 - DNA, 1347 bp, Bacillus subtilis
  CDS (1)..(1347): transl_table=11
atgccgttaatcatcgttgcacttgggatcttagcattactatttctgattatgggcttaaaattaaacacatttatttccctgctggtcgtatcgttcggcgtggcactggcactcgggatgccgttcgataaagttgtcagctccatcgaagcaggaataggggggactcttggccacatcgcgctcatcttcggactcggtgcgatgctgggcaaactgatcgcggattcaggaggcgcacagcgcattgcgatgacgctcgtcaacaaattcggtgagaaaaatattcaatgggccgttgtcattgcctcattcattattgggattgcgttattttttgaagtaggactggttctattaattccgattgtctttgcgatttcaagagaattgaagatttctattttatttctcggaatcccgatggtcgcggcactatccgtcacacacggtttcctgccgccgcacccgggacctacggcgatcgccggtgagtatggcgcaaacattggagaagtgctgctgtacggctttatcgttgctgttccgacagtgctcattgcagggccgttatttacaaagttcgcgaaaaaaatcgttcctgcatcatttgcgaaaaacggcaatattgcatcactcggcacacaaaaaacatttaaccttgaagaaacacccggctttggaatcagtgtctttactgcaatgctcccgattatcatcatgtcggtcgcgaccattatcgacctgcttcaagaaacaatcgggtttgcagataacggagttttagcttttatcagattgattggaaacgcatcgactgctatgattatttcgttattggtcgcagtctatacaatgggcatcaagcgcaacattccagtcaaaaccgtgatggattcttgttcaactgccatttcacaaatcggcatgatgcttttgatcatcggaggaggcggcgccttcaaacaagtgctgatcaacggcggtgtcggcgattacgtagcagacttattcaaaggaacggcattatcgccaatcattctggcatggctcatcgcagcgatcctgcgcatttctctaggatcggcgactgttgccgcactaagcacaacaggtctggtcattccgttattgggccattctgatgttaacctggcgttagtcgtactcgcaacaggagccggaagtgtcatcgcttcacacgtcaatgacgccggcttctggatgttcaaggaatacttcggattaagcatgaaagaaacattcgccacatggacattgctggaaaccattatttccgttgctggactgggattcattttattgttaagtttagttgtatga

SEQ ID NO: 10233 - protein, 448 aa, Bacillus subtilis
MPLIIVALGILALLFLIMGLKLNTFISLLVVSFGVALALGMPFDKVVSSIEAGIGGTLGHIALIFGLGAMLGKLIADSGGAQRIAMTLVNKFGEKNIQWAVVIASFIIGIALFFEVGLVLLIPIVFAISRELKISILFLGIPMVAALSVTHGFLPPHPGPTAIAGEYGANIGEVLLYGFIVAVPTVLIAGPLFTKFAKKIVPASFAKNGNIASLGTQKTFNLEETPGFGISVFTAMLPIIIMSVATIIDLLQETIGFADNGVLAFIRLIGNASTAMIISLLVAVYTMGIKRNIPVKTVMDSCSTAISQIGMMLLIIGGGGAFKQVLINGGVGDYVADLFKGTALSPIILAWLIAAILRISLGSATVAALSTTGLVIPLLGHSDVNLALVVLATGAGSVIASHVNDAGFWMFKEYFGLSMKETFATWTLLETIISVAGLGFILLLSLVV

SEQ ID NO: 10234 - DNA, 1356 bp, Zymomonas mobilis
  CDS (1)..(1356): transl_table=11
atgcactctaatggaacaatgctccttttatatgcattggcgtccatcatcattcttattttgatgattgcaaagtggcgtctaaacccttttgtttcccttattttagtttcaatcggtatgggtgccgtaacgggcatgcccttaaccaaagttttgtcggcctttcaagatggtcttggttctggtatcggttccacagcgagtgttatcgcactcggcaccatgcttggtaagatcttggctgagtctggtggtgcggaacgtatcgctacgacgacgatcaaaatctttggccccaaacttatccactgggcgatgctggtcattgcctttatcgtgggtattccgatcttctatcaggtcggttttatcctgttgattccgctcgtctttaccttaggacgtgccagcgggatttctcttgtcaaattaaccattccgctttgtgccggtttggcgaccgttcatggtttgctgcctccgcatccgggttcaatgcaatgcgttgaaatgctccatgctgatgtgggtaaaaccattctttacggtttcatcgtcggtttccctgccgctatccttgccggtccgctttacggcaattggattacgcctcgcattcagctgcctgcccacaacccatttgcagaaagtcttgaaggtagcagcgatcaggataaaaatttgccgggtttctggctgacgattttctcgattttgcttcctgttttgctgatggttttttccagcggcgccaatatcttcctgccccacggtaacaacattcgcgctttcatgaacttcatgggtgatccggttgtttccttgcttatcgctttgctggtcagcatggtcaccttgggtttctggcgtggtttcagcagtgctgatcttctgaaattcaccaatgactgcttgggcccgacggctggcattctgttgctgatcggtgctggtggcggatttagtgaaattctgtatcgcgccggtgtcagtaacgccatggccgatctgtctcacgtcatgcatctgtccccgattatgctcggctttatcattgcggcggttatccgcgttgcaaccggttcacagacggtggcaatgtcgatgtccggcggtatgttagccccgatcatcttcagcaccccgggcttccacagccctgaattgctggttctttcgatcggtgccggttcgtccattctgtctcacgtcaatgacggtgctttctggctgttaaaagaatatctgaatatgacggtcagccagaccttcaagacctggacggtttctgtcaccatcgcttcgattgcagccctgatcctcacctttggtcttcaggcattgggtctttaa

SEQ ID NO: 10235 - protein, 451 aa, Zymomonas mobilis
MHSNGTMLLLYALASIIILILMIAKWRLNPFVSLILVSIGMGAVTGMPLTKVLSAFQDGLGSGIGSTASVIALGTMLGKILAESGGAERIATTTIKIFGPKLIHWAMLVIAFIVGIPIFYQVGFILLIPLVFTLGRASGISLVKLTIPLCAGLATVHGLLPPHPGSMQCVEMLHADVGKTILYGFIVGFPAAILAGPLYGNWITPRIQLPAHNPFAESLEGSSDQDKNLPGFWLTIFSILLPVLLMVFSSGANIFLPHGNNIRAFMNFMGDPVVSLLIALLVSMVTLGFWRGFSSADLLKFTNDCLGPTAGILLLIGAGGGFSEILYRAGVSNAMADLSHVMHLSPIMLGFIIAAVIRVATGSQTVAMSMSGGMLAPIIFSTPGFHSPELLVLSIGAGSSILSHVNDGAFWLLKEYLNMTVSQTFKTWTVSVTIASIAALILTFGLQALGL

SEQ ID NO: 10236 - DNA, 1317 bp, Escherichia coli
  CDS (1)..(1317): transl_table=11
atgccattagtcattgttgctatcggtgtaatcttgttgttgctcctgatgatccgcttcaaaatgaacggcttcatcgctctcgtcctcgtggcgcttgctgttggattaatgcaaggaatgccgctggataaagttattggctccatcaaagccggtgtcggcgggacgctcggtagccttgccctgatcatgggttttggcgcaatgctgggcaaaatgctggcagactgcggtggcgcacaacgtatcgccaccacgctgattgccaaatttggtaaaaaacacatccagtgggcggtggtactgaccggttttaccgttggttttgccctgttctatgaagtgggctttgtgctgatgctgccgctggtgtttaccatcgcggcttctgcgaatattccactgctgtatgttggtgtaccaatggcggctgcactgtctgtgacccacggcttcctgccaccgcatccgggtccgactgcgattgccaccattttcaatgccgatatgggtaaaaccctgctgtacggtactattctggcaatcccgaccgtgattctcgccggtccggtttacgctcgcgtgttgaaaggtatcgataagccaattccggaaggtctctacagcgcgaaaaccttcagcgaagaagagatgccgagctttggcgtcagcgtctggacctctctggtgccggtagtactgatggcgatgcgtgcgattgccgaaatgatcctgccgaaaggtcacgctttcctgccggtagcggagttcctcggtgacccggtaatggcaacgctgattgccgtgctgattgcgatgttcacctttggtctaaaccgtggtcgttcaatggatcagattaacgacacgctggtttcttccatcaaaatcattgcgatgatgctgttgatcatcggtggtggcggtgcgttcaagcaggtgctggtagacagcggcgtggacaaatacattgcttccatgatgcacgaaaccaacatttctccgctgctgatggcctggtcgattgctgccgtactgcgtatcgcgctgggttccgcaaccgttgcggcaatcactgcgggtggtatcgcggcaccgctgattgcaacgacgggtgttagcccggagctgatggttattgcggttggttccggtagtgtgattttctctcatgtgaacgatccgggcttctggctgttcaaagagtactttaacctgactatcggcgagaccatcaaatcctggtcgatgctggaaaccattatctcggtgtgcggtctggtaggctgtctgctgctgaatatggtgatttga

SEQ ID NO: 10237 - protein, 438 aa, Escherichia coli
MPLVIVAIGVILLLLLMIRFKMNGFIALVLVALAVGLMQGMPLDKVIGSIKAGVGGTLGSLALIMGFGAMLGKMLADCGGAQRIATTLIAKFGKKHIQWAVVLTGFTVGFALFYEVGFVLMLPLVFTIAASANIPLLYVGVPMAAALSVTHGFLPPHPGPTAIATIFNADMGKTLLYGTILAIPTVILAGPVYARVLKGIDKPIPEGLYSAKTFSEEEMPSFGVSVWTSLVPVVLMAMRAIAEMILPKGHAFLPVAEFLGDPVMATLIAVLIAMFTFGLNRGRSMDQINDTLVSSIKIIAMMLLIIGGGGAFKQVLVDSGVDKYIASMMHETNISPLLMAWSIAAVLRIALGSATVAAITAGGIAAPLIATTGVSPELMVIAVGSGSVIFSHVNDPGFWLFKEYFNLTIGETIKSWSMLETIISVCGLVGCLLLNMVI

SEQ ID NO: 10238 - DNA, 1341 bp, Escherichia coli O157
  CDS (1)..(1341): transl_table=11
gtgactacattaacgcttgttttaacagcagtagggtctgttttactgctgctgtttttagtcatgaaggcgcgtatgcacgctttcctggctttaatggtggtgtccatgggggctggccttttttccggtatgccgctcgataaaatcgcagcgacgatggaaaaagggatgggaggcaccctcggcttcctggcggtggttgtcgccctgggagctatgtttggcaagatcttacatgaaaccggcgcagtcgatcagattgccgtcaaaatgcttaaatccttcggtcacagccgcgcgcattatgccatcggccttgcggggctggtctgtgcgctaccgctgttctttgaagtggcgattgttctgctgattagcgttgctttctcaatggcgcgccacaccggtacgaacctggtgaagctggtaatcccattattcgcaggcgtggcggccgcggcggcgttcctggtgccagggccagcgccaatgctgctggcatcgcagatgaacgccgattttggctggatgatcctgattggcctgtgtgcggcaattccgggaatgattattgccgggccgctgtggggtaacttcatcagccgttacgttgagctgcatattcctgacgacatcagcgaaccgcatctcggcgaaggcaaaatgccatccttcggattcagcctgtcgctgatcctgctgccgctggtgctggtagggctgaaaaccattgccgcgcgttttgtgccggaaggctctaccgcttacgaatggttcgagtttattggtcatccgtttaccgcgattctggttgcttgtctggtagcgatttatggcctggcaatgcgtcagggcatgccaaaagacaaagtgatggagatttgcggtcacgcgctgcaaccggcggggatcattctgctggtgattggtgcgggcggcgtgttcaaacaggtgctggttgactctggcgtaggtccggcactgggcgaagcgttaaccggcatgggcctgccgattgccatcacctgcttcgtgctggccgctgcagtgcgcatcattcagggttctgcaaccgttgcctgtttaacggcggtgggactggtgatgccggttattgaacaactgaactactccggtgcgcaaatggcggcgctgtcgatttgtatcgccggtggttcgattgttgtcagccacgttaacgacgctggtttctggttgttcggtaaatttaccggcgcgaccgaagccgaaacgctgaaaacctggaccatgatggaaaccatcctcggcactgtcggtgccatcgttgggatgattgcgttccagctgttgagttaa

SEQ ID NO: 10239 - protein, 446 aa, Escherichia coli O157
MTTLTLVLTAVGSVLLLLFLVMKARMHAFLALMVVSMGAGLFSGMPLDKIAATMEKGMGGTLGFLAVVVALGAMFGKILHETGAVDQIAVKMLKSFGHSRAHYAIGLAGLVCALPLFFEVAIVLLISVAFSMARHTGTNLVKLVIPLFAGVAAAAAFLVPGPAPMLLASQMNADFGWMILIGLCAAIPGMIIAGPLWGNFISRYVELHIPDDISEPHLGEGKMPSFGFSLSLILLPLVLVGLKTIAARFVPEGSTAYEWFEFIGHPFTAILVACLVAIYGLAMRQGMPKDKVMEICGHALQPAGIILLVIGAGGVFKQVLVDSGVGPALGEALTGMGLPIAITCFVLAAAVRIIQGSATVACLTAVGLVMPVIEQLNYSGAQMAALSICIAGGSIVVSHVNDAGFWLFGKFTGATEAETLKTWTMMETILGTVGAIVGMIAFQLLS

SEQ ID NO: 10240 - DNA, 1353 bp, Pseudomonas aeruginosa
  CDS (1)..(1353): transl_table=11
atgttcggcatgtcacacgatgcctacctgctcctcgacgccctggtgaccatcatcggcctgatcgtgctgatcacccgcttcaaggtgcatcccttcatcgccctgatcatcgccgccggcttcctcggcctgacctcggggatgccggtggagaagatcgtcaaatccttccaggacggcttcggcggcgtgctcggcttcgtcggcgtgatcctcgccctgggcaccatgctcggcaagctgatggccgattccggcggcgccgaccagatcgcccgcaccctgatccgcgccttcggcaaggagcgggtgcactggtcgatgatgctcgccgcgttcctggtgggcatcccgctgttcttcgagatcggcttcatcctgctgatcccgctggtgttcatcgtcgcccggcgcagcggcgtgtccctgatcaagatcggcatcccgttgctcgccggcctttccgcggtgcacggtctggtgccgccgcatcccggcccgctgctggcgatcggcgtgttcggcgccgacatcggcaagaccatcctctacggcctgatcgtcgccctgcccaccgccgccatcgccggcccgctgttcggcgcgctggtctcgcgctacatacccggcacgccatcggcggaactggtcgagcagatcgcccacgagcccgagacccaggacctgcccagcttcggcgtgaccctggcgaccgtgctgctgccggtgttcctgatgctgctgaagaccttcgccgacgtcgccttccccgatggccacgcgttccgcgcctggatggacatgatcggccatccgatcagcgccctgctcctggccctgctggtggcgctctataccttcggctacgcccgtggcttcgactcgaagaaaatcctcaggctgctcgaccagagcctggcaccgaccgccgccatcgtgatgatcatcggcgccggcggcggcttcaagcagatgctggtggccagcggggtcggcgacgtcatcggccatctcgcggtgaacgcgcagatctcgccgatcctgctggcctggctggtggccgcggtgatccgcatcgccaccggctcggccaccgtcgccaccatcaccggggccggcatcgtggtgccggtgatcgacctgattcccggcgtcaaccgcgagttgctggtgctcgccaccggcgccggctcgctgatcctctcccatgtcaacgacgccgggttctggctggtcaagcagtacttcaacatgagcgtcagcgagaccttcaagacctggaccgcgatggagaccatcctctccgtggtcggcctggtcttcatcctgttgctgtcgctggtgctctga

SEQ ID NO: 10241 - protein, 450 aa, Pseudomonas aeruginosa
MFGMSHDAYLLLDALVTIIGLIVLITRFKVHPFIALIIAAGFLGLTSGMPVEKIVKSFQDGFGGVLGFVGVILALGTMLGKLMADSGGADQIARTLIRAFGKERVHWSMMLAAFLVGIPLFFEIGFILLIPLVFIVARRSGVSLIKIGIPLLAGLSAVHGLVPPHPGPLLAIGVFGADIGKTILYGLIVALPTAAIAGPLFGALVSRYIPGTPSAELVEQIAHEPETQDLPSFGVTLATVLLPVFLMLLKTFADVAFPDGHAFRAWMDMIGHPISALLLALLVALYTFGYARGFDSKKILRLLDQSLAPTAAIVMIIGAGGGFKQMLVASGVGDVIGHLAVNAQISPILLAWLVAAVIRIATGSATVATITGAGIVVPVIDLIPGVNRELLVLATGAGSLILSHVNDAGFWLVKQYFNMSVSETFKTWTAMETILSVVGLVFILLLSLVL

SEQ ID NO: 10242 - DNA, 1320 bp, Escherichia coli
  CDS (1)..(1320): transl_table=11
atgccattaatcattattgcggcaggcgtcgcgctgcttcttatcctgatgatcggctttaaagttaacggctttattgccctcgttctggtagctgccgtcgtcggatttgccgaagggatggatgcacaggccgtcctgcactctatacaaaatggtatcggcagcacgctcggcgggctggcaatgatcctcggtttcggggccatgttaggcaagctgatttctgatacgggtgcggcacaacgtatcgccactacgctgattgctacttttggtaaaaaacgcgtgcaatgggcgctagtgatcaccggtctggttgtgggcctcgccatgttttttgaagtgggttttgtcctgctgttgccgttggtatttaccatcgtagcatcatcaggattacccctgttgtatgttggcgtaccaatggtagcagcgctctctgtaacccactgttttctgccgccacatccagggcctactgccatcgcgactatctttgaggctaatctcggaacgactttactgtatggatttatcattaccattccgacagttattgtcgcaggaccgctgttttctaaactgctaactcgctttgagaaagcaccaccggaaggcttatttaatcctcatctgtttagcgaagaggagatgccctccttctggaacagtattttcgctgccgtgatcccggtcatcctgatggctatcgccgccgtttgtgaaattacgttaccgaaaactaacaccgtgcgcctcttctttgaatttgtcggtaaccctgccgttgcgctgtttattgccattgttattgcgattttcacactgggccgacgtaatggacgcaccatcgagcaaatcatggatatcattggggattctataggcgctatcgcgatgattgtgtttattatcgctggcggcggcgcgtttaagcaggtattagtagatagcggtgtcgggcactatatttcacacttaatgaccggaactacactttcgccgttattgatgtgctggactgttgcggcgctgttgcgtatcgctctgggctctgccaccgtcgcggccattaccaccgcgggtgtggtgttgccgattatcaacgttacccatgccgatcccgctttaatggtactggcaaccggtgcgggcagcgtgatcgcgtcacacgtaaacgaccctggcttctggctatttaaagggtattttaatctgacggttggtgaaacgttgcgtacctggacggtgatggaaacccttatttctattatgggtttgctgggcgtgttagccattaacgccgtattgcactga

SEQ ID NO: 10243 - protein, 439 aa, Escherichia coli
MPLIIIAAGVALLLILMIGFKVNGFIALVLVAAVVGFAEGMDAQAVLHSIQNGIGSTLGGLAMILGFGAMLGKLISDTGAAQRIATTLIATFGKKRVQWALVITGLVVGLAMFFEVGFVLLLPLVFTIVASSGLPLLYVGVPMVAALSVTHCFLPPHPGPTAIATIFEANLGTTLLYGFIITIPTVIVAGPLFSKLLTRFEKAPPEGLFNPHLFSEEEMPSFWNSIFAAVIPVILMAIAAVCEITLPKTNTVRLFFEFVGNPAVALFIAIVIAIFTLGRRNGRTIEQIMDIIGDSIGAIAMIVFIIAGGGAFKQVLVDSGVGHYISHLMTGTTLSPLLMCWTVAALLRIALGSATVAAITTAGVVLPIINVTHADPALMVLATGAGSVIASHVNDPGFWLFKGYFNLTVGETLRTWTVMETLISIMGLLGVLAINAVLH

SEQ ID NO: 10244 - DNA, 1365 bp, Escherichia coli
  CDS (1)..(1365): transl_table=11
atgtccacaattacattgttatgcattgcgttagctggcgtaatcatgctgttgctgctggtcatcaaggcaaaggtacaaccattcgttgctttgctcctcgtcagcctgttagtcgcacttgcggcaggtataccggcgggcgaagtgggtaaagtgatgatcgccgggatgggcggtgtgcttggttccgtcactattattattggtctgggcgctatgctggggcgtatgatcgaacactctggtggtgcagagtcactggctaattatttcagtcgcaagttaggtgacaaacgaactatcgctgcgctgactctggcagcgttcttcctcggtattcccgtcttctttgatgtcggctttattattcttgcgccaatcatttacggttttgccaaggttgccaaaatatcgccactcaaatttggcctgcctgtcgctgggatcatgctcactgttcacgtggcggtaccgccgcatccaggccctgtcgccgcagcggggttactccacgcagacatcggctggctaaccatcatcggtattgcgatttctattcccgtaggggttgttggctactttgcagcgaaaataatcaataagcgccaatatgcgatgtcagtagaagtactggaacagatgcaactggctccggccagtgaggaaggcgcgacaaaattaagcgataaaataaatccaccgggcgtcgcgctggtcacctcgctaattgttattcctatcgcgattatcatggcgggtacggtttccgcaacactgatgccgccttcgcatcccctgcttggtacgctacagctgatcggctcaccaatggtagctctaatgattgcgctggtgctggcattctggttattggctttacgtcgcggctggagcttacaacacaccagcgacattatgggctcagcgcttcctactgcggcggtagtgattttggttactggtgctggaggggtatttggcaaagtgctggtggaatcgggcgtcggcaaagcccttgccaacatgctacaaatgattgacctgcctctgttaccagccgcatttattatttcactggcgctgcgtgcatcgcaggggtcagcaaccgtagcaatactgacaaccggcgggttactctcagaagcggtgatgggattgaatccgattcagtgcgtattggtgacgctggcagcctgctttggtgggcttggtgcgtcacatattaatgactcagggttctggattgtgaccaaatatctggggttgtcggtagcagacggtctgaaaacctggacagtgttaacgaccattctcggttttaccggattcttaattacctggtgcgtatgggcggtaatttga

SEQ ID NO: 10245 - protein, 454 aa, Escherichia coli
MSTITLLCIALAGVIMLLLLVIKAKVQPFVALLLVSLLVALAAGIPAGEVGKVMIAGMGGVLGSVTIIIGLGAMLGRMIEHSGGAESLANYFSRKLGDKRTIAALTLAAFFLGIPVFFDVGFIILAPIIYGFAKVAKISPLKFGLPVAGIMLTVHVAVPPHPGPVAAAGLLHADIGWLTIIGIAISIPVGVVGYFAAKIINKRQYAMSVEVLEQMQLAPASEEGATKLSDKINPPGVALVTSLIVIPIAIIMAGTVSATLMPPSHPLLGTLQLIGSPMVALMIALVLAFWLLALRRGWSLQHTSDIMGSALPTAAVVILVTGAGGVFGKVLVESGVGKALANMLQMIDLPLLPAAFIISLALRASQGSATVAILTTGGLLSEAVMGLNPIQCVLVTLAACFGGLGASHINDSGFWIVTKYLGLSVADGLKTWTVLTTILGFTGFLITWCVWAVI

SEQ ID NO: 10246 - DNA, 1350 bp, Escherichia coli
  CDS (1)..(1350): transl_table=11
atgccactaattatcgttgtggcagggattgctttactcctgcttttaaccataaaaattaagcttaatacgtttgtttcgttaattattgtctcgattgctgtcgccatcgccagtggtatggatttgagtaaagtcgtcacctcagtcgaatccggacttggcggtacgctgggccatattggtttgatatttggcttcggtgttatgctcggtcgcttgctggccgatgcgggtggtgcgcagcgaatagcgctgaccatgctgaattatttcgggaaaaataaacttgactgggcagtggtctgttcggcgtttattgtcggtatcgcactttttttcgaagtcggtttaattcttctggtacctattttattcgctattgcccgtgaagcaaaaatatcaccgatgtttatgtgtgtgccgatgctttctggtttgctggtcgcacacggttttttgccgccgcaccccggcccgactgttatcgccagggaatatggcgctgatgtaggattggtactgatatacggtatcattgtcggcattccaacctttattctttgcggcccggtattgaataaattctgccagcgcattattccggacgcctttaaaaaagaggggaatatagcctctctcggcgcgacccgccgattcagcgaaagcgaaatgccaggctttgggatcagttttctcacggcaatgctgccggtgatcctgatggcggttgtcaccatcatccagatgactcatgccaaaagtgccgcggattcaggcttattttacaacgtgatactgttcttaggtaattcaacgatcgccatgctgatttcactgctattcgcgatctataccatgggcctggggcgcgggaaaacaatccctgacctgatggattcttgcggaaaagctatcgcgggtattgccggtctgctgctgattatcggtggtggtggtgcattcaagcaagttctcatcgactctggcgttggtcagtatatttccaccctggtttcgggtatggatattaacccgatcctgatggcctggggcgtggccgcattcctgcgtatttgtctgggttcagccaccgtcgcggcgatctctaccgccggtctggtcatcccattgttggcagtacatcccaataccaacctggccttgattacgctggctaccggtgccggatcctgtatttgttctcacgttaacgatgccagtttctggatgattaaagacttttttggcctgaccaccaaagaaacgctgttatcctggacgctgatgtccacactcttatccatcagtgggctgatttttattctgctcgccagcttagttttataa

SEQ ID NO: 10247 - protein, 449 aa, Escherichia coli
MPLIIVVAGIALLLLLTIKIKLNTFVSLIIVSIAVAIASGMDLSKVVTSVESGLGGTLGHIGLIFGFGVMLGRLLADAGGAQRIALTMLNYFGKNKLDWAVVCSAFIVGIALFFEVGLILLVPILFAIAREAKISPMFMCVPMLSGLLVAHGFLPPHPGPTVIAREYGADVGLVLIYGIIVGIPTFILCGPVLNKFCQRIIPDAFKKEGNIASLGATRRFSESEMPGFGISFLTAMLPVILMAVVTIIQMTHAKSAADSGLFYNVILFLGNSTIAMLISLLFAIYTMGLGRGKTIPDLMDSCGKAIAGIAGLLLIIGGGGAFKQVLIDSGVGQYISTLVSGMDINPILMAWGVAAFLRICLGSATVAAISTAGLVIPLLAVHPNTNLALITLATGAGSCICSHVNDASFWMIKDFFGLTTKETLLSWTLMSTLLSISGLIFILLASLVL

SEQ ID NO: 10248 - DNA, 1335 bp, Bacillus subtilis
  CDS (1)..(1335): transl_table=11
atgccgattttaattgtagctgtcggagtgctgattctgttatttctcattattaaagtaaaattaaatacctttgtctcactgattgtcgtttcatttttagtagccatcggacttggaatggatatcaataaaattgttctttcaattgagactggaattggcgggcagctggggcatttagctttagtgtttggacttggcgcgatgcttgggaggcttgtctcagatgctgggggcggctaccggatcgccattacgctgattgacaaattcgggaggaaacgaatacaggcggcggttgtggttgcctcttttatcatcgggattgccctattttttgaagtcggtcttgttctgttgataccgattgtttacgcgattgctaaagaattaaaaatgccttttctgtatctgggaatcccgatggccgccgccttaaatgttactcacggatttttgcccccgcatcctgctccaactgctatctcagttgcatatggtgcccatattggccaggtgctgctttttggaatcatcatcgctgttccgacaactgtgattgccgggcctttatttaataaatttgcgatgaaacggtttcctggtgcgtatcaaaagcatggaaacctatcggggttaggaccaaggaaagaatttcagctggatgaaacaccgggctttgcgatcagtgctgtcacgtctttattcccggttatctttatggcaatggcaacaattttttctttattattgagtgaacattcaaaaggaaaagacattatagaatttatcggcactccgggaacggcaatgctcatttcgctgttgcttgcactctatacgatgggatatgcccgtaaaatatctatgcaggaaatcggcagatctatttcagaatcaatttcgcaaattgcgatgatgctgctcatcataggagggggaggagcgtttaaacaggtgctgattgacggcggagtcggcgattatgtcgctgattttttccgtcaaacaaacatgtcgccgctattcgttgcatggaccatcgccgcggttctgcgtctgtgtctaggctctgctaccgtggctgcgcttaccacagcgggaatggcagctccgcttatggaggctggcagtgtaaaccctgcgttaatggtgcttgcaacaggagccggcagtgtcattgcgtgtcatgtaaatgatgcaggattttggatggtaaaggaatttttcggcttgagcatgaaagaaacatttcaaacctggacgctgcttacaacagttctttcggttacagggctcggctgtgtgttattggcagggcttgtgatgtaa

SEQ ID NO: 10249 - protein, 444 aa, Bacillus subtilis
MPILIVAVGVLILLFLIIKVKLNTFVSLIVVSFLVAIGLGMDINKIVLSIETGIGGQLGHLALVFGLGAMLGRLVSDAGGGYRIAITLIDKFGRKRIQAAVVVASFIIGIALFFEVGLVLLIPIVYAIAKELKMPFLYLGIPMAAALNVTHGFLPPHPAPTAISVAYGAHIGQVLLFGIIIAVPTTVIAGPLFNKFAMKRFPGAYQKHGNLSGLGPRKEFQLDETPGFAISAVTSLFPVIFMAMATIFSLLLSEHSKGKDIIEFIGTPGTAMLISLLLALYTMGYARKISMQEIGRSISESISQIAMMLLIIGGGGAFKQVLIDGGVGDYVADFFRQTNMSPLFVAWTIAAVLRLCLGSATVAALTTAGMAAPLMEAGSVNPALMVLATGAGSVIACHVNDAGFWMVKEFFGLSMKETFQTWTLLTTVLSVTGLGCVLLAGLVM

SEQ ID NO: 10250 - DNA, 24 bp, Artificial sequence
  primer
atgcatgtgcttaacattctctgg

SEQ ID NO: 10251 - DNA, 25 bp, Artificial sequence
  primer
ttacgctaccatgctaataatcagc

SEQ ID NO: 10252 - protein, 481 aa, Artificial sequence
  consensus sequence
  Variant (2)..(5): Xaa in position 2 to 5 is any amino acid
  Variant (7)..(9): Xaa in position 7 to 9 is any amino acid
  Variant (11)..(12): Xaa in position 11 to 12 is any amino acid
  Variant (14)..(24): Xaa in position 14 to 24 is any amino acid
  Variant (26)..(37): Xaa in position 26 to 37 is any amino acid
  Variant (38)..(46): Xaa in position 38 to 46 is any or no amino acid
  Variant (48)..(48): Xaa in position 48 is any amino acid
  Variant (50)..(51): Xaa in position 50 to 51 is any amino acid
  Variant (54)..(61): Xaa in position 54 to 61 is any amino acid
  Variant (63)..(63): Xaa in position 63 is any amino acid
  Variant (65)..(65): Xaa in position 65 is any amino acid
  Variant (67)..(72): Xaa in position 67 to 72 is any amino acid
  Variant (74)..(74): Xaa in position 74 is any amino acid
  Variant (76)..(78): Xaa in position 76 to 78 is any amino acid
  Variant (80)..(86): Xaa in position 80 to 86 is any amino acid
  Variant (88)..(93): Xaa in position 88 to 93 is any amino acid
  Variant (95)..(102): Xaa in position 95 to 102 is any amino acid
  Variant (104)..(106): Xaa in position 104 to 106 is any amino acid
  Variant (108)..(110): Xaa in position 108 to 110 is any amino acid
  Variant (112)..(116): Xaa in position 112 to 116 is any amino acid
  Variant (118)..(135): Xaa in position 118 to 135 is any amino acid
  Variant (136)..(142): Xaa in position 136 to 142 is any or no amino acid
  Variant (144)..(151): Xaa in position 144 to 151 is any amino acid
  Variant (153)..(155): Xaa in position 153 to 155 is any amino acid
  Variant (160)..(160): Xaa in position 160 is any amino acid
  Variant (162)..(169): Xaa in position 162 to 169 is any amino acid
  Variant (171)..(172): Xaa in position 171 to 172 is any amino acid
  Variant (173)..(174): Xaa in position 173 to 174 is any or no amino acid
  Variant (176)..(180): Xaa in position 176 to 180 is any amino acid
  Variant (182)..(186): Xaa in position 182 to 186 is any amino acid
  Variant (188)..(221): Xaa in position 188 to 221 is any amino acid
  Variant (222)..(249): Xaa in position 222 to 249 is any or no amino acid
  Variant (251)..(261): Xaa in position 251 to 261 is any amino acid
  Variant (263)..(264): Xaa in position 263 to 264 is any amino acid
  Variant (266)..(286): Xaa in position 266 to 286 is any amino acid
  Variant (287)..(317): Xaa in position 287 to 317 is any or no amino acid
  Variant (319)..(322): Xaa in position 319 to 322 is any amino acid
  Variant (324)..(359): Xaa in position 324 to 359 is any amino acid
  Variant (360)..(361): Xaa in position 360 to 361 is any or no amino acid
  Variant (363)..(364): Xaa in position 363 to 364 is any amino acid
  Variant (366)..(366): Xaa in position 366 is any amino acid
  Variant (369)..(369): Xaa in position 369 is any amino acid
  Variant (371)..(373): Xaa in position 371 to 373 is any amino acid
  Variant (375)..(377): Xaa in position 375 to 377 is any amino acid
  Variant (379)..(400): Xaa in position 379 to 400 is any amino acid
  Variant (401)..(401): Xaa in position 401 is any or no amino acid
  Variant (403)..(405): Xaa in position 403 to 405 is any amino acid
  Variant (407)..(409): Xaa in position 407 to 409 is any amino acid
  Variant (416)..(417): Xaa in position 416 to 417 is any amino acid
  Variant (419)..(424): Xaa in position 419 to 424 is any amino acid
  Variant (426)..(439): Xaa in position 426 to 439 is any amino acid
  Variant (440)..(445): Xaa in position 440 to 445 is any or no amino acid
  Variant (447)..(449): Xaa in position 447 to 449 is any amino acid
  Variant (451)..(454): Xaa in position 451 to 454 is any amino acid
  Variant (457)..(457): Xaa in position 457 is any amino acid
  Variant (460)..(461): Xaa in position 460 to 461 is any amino acid
  Variant (464)..(479): Xaa in position 464 to 479 is any amino acid
  Variant (480)..(480): Xaa in position 480 is any or no amino acid
LXXXXKXXXFXXLXXXXXXXXXXXGXXXXXXXXXXXXXXXXXXXXXGXGXXLGXXXXXXXXGXMXGXXXXXXGXAXXXAXXXXXXXGXXXXXXAXXXXXXXXGXXXFXXXGXXXXXPXXXXXXXXXXXXXXXXXXXXXXXXXPXXXXXXXXHXXXPPHPXPXXXXXXXXAXXXXGXXXXXGXXXXXPXXXXXXXXXXXXXXXXXXXXXXXXXXXXXXXXXXXXXXXXXXXXXXXXXXXXXXXXXXXXXXPXXXXXXXXXXXPXXLXXXXXXXXXXXXXXXXXXXXXXXXXXXXXXXXXXXXXXXXXXXXXXXXXXXXGXXXXAXXXXXXXXXXXXXXXXXXXXXXXXXXXXXXXXXXXXXXLXXGXGGXFXXXLXXXGXXXXXXXXXXXXXXXXXXXXXXXAXXXRXXXGSATVAXXTXXXXXXPXXXXXXXXXXXXXXXXXXXXAXXXGXXXXSHXNDXXFWXXXXXXXXXXXXXXXXXW

SEQ ID NO: 10253 - protein, 20 aa, Artificial sequence
  protein pattern
  Variant (2)..(2): Xaa in position 2 is any amino acid
  Variant (5)..(5): Xaa in position 5 is Ala, Gly, Pro, Ser or Thr
  Variant (6)..(6): Xaa in position 6 is any amino acid
  Variant (9)..(9): Xaa in position 9 is Ile, Leu, Met or Val
  Variant (10)..(10): Xaa in position 10 is Phe, Ile, Leu or Val
  Variant (11)..(16): Xaa in position 11 to 16 is any amino acid
  Variant (17)..(17): Xaa in position 17 is Asp, Asn, Ser or Thr
  Variant (18)..(19): Xaa in position 18 to 19 is any amino acid
  Variant (20)..(20): Xaa in position 20 is Asp, Glu, Gln or Thr
HXNDXXFWXXXXXXXXXXXX

SEQ ID NO: 10254 - protein, 31 aa, Artificial sequence
  protein pattern
  Variant (2)..(10): Xaa in position 2 to 10 is any amino acid
  Variant (12)..(12): Xaa in position 12 is Ala, Thr or Val
  Variant (13)..(13): Xaa in position 13 is Ile, Met or Val
  Variant (14)..(14): Xaa in position 14 is Phe, Ile, Leu or Met
  Variant (16)..(16): Xaa in position 16 is any amino acid
  Variant (17)..(17): Xaa in position 17 is Ile, Leu or Met
  Variant (18)..(18): Xaa in position 18 is Phe, Ile, Leu, Met or Val
  Variant (19)..(20): Xaa in position 19 to 20 is any amino acid
  Variant (21)..(21): Xaa in position 21 is Ala, Cys, Gly, Ser or Thr
  Variant (23)..(23): Xaa in position 23 is Ala or Gly
  Variant (25)..(26): Xaa in position 25 to 26 is any amino acid
  Variant (27)..(27): Xaa in position 27 is Ile, Leu, Met or Val
  Variant (28)..(28): Xaa in position 28 is Ala, Gly or Ser
  Variant (29)..(30): Xaa in position 29 to 30 is any amino acid
  Variant (31)..(31): Xaa in position 31 is Phe, Ile, Leu, Met or Val
LXXXXXXXXXGXXXGXXXXXXGXAXXXXXXX

SEQ ID NO: 10255 - protein, 23 aa, Artificial sequence
  protein pattern
  Variant (2)..(9): Xaa in position 2 to 9 is any amino acid
  Variant (10)..(13): Xaa in position 10 to 13 is any or no amino acid
  Variant (15)..(16): Xaa in position 15 to 16 is any amino acid
  Variant (17)..(17): Xaa in position 17 is Ile, Leu or Val
  Variant (22)..(22): Xaa in position 22 is Ala, Gly or Ser
  Variant (23)..(23): Xaa in position 23 is Ala, Pro or Ser
PXXXXXXXXXXXXHXXXPPHPXX

SEQ ID NO: 10256 - protein, 25 aa, Artificial sequence
  protein pattern
  Variant (2)..(4): Xaa in position 2 to 4 is any amino acid
  Variant (5)..(8): Xaa in position 5 to 8 is any or no amino acid
  Variant (10)..(10): Xaa in position 10 is Ala, Ile, Leu or Val
  Variant (11)..(12): Xaa in position 11 to 12 is any amino acid
  Variant (15)..(15): Xaa in position 15 is Ala, Gly or Ser
  Variant (18)..(18): Xaa in position 18 is Ala or Ser
  Variant (19)..(20): Xaa in position 19 to 20 is any amino acid
  Variant (21)..(21): Xaa in position 21 is Ser or Thr
  Variant (22)..(22): Xaa in position 22 is Ala, Gly, Ser or Thr
  Variant (23)..(23): Xaa in position 23 is Ala, Cys, Gly, Ser, Thr or Val
  Variant (24)..(24): Xaa in position 24 is Ala, Gly, Ser or Thr
  Variant (25)..(25): Xaa in position 25 is Ile, Leu, Met or Val
AXXXXXXXRXXXGSXTVXXXXXXXX

SEQ ID NO: 10257 - protein, 34 aa, Artificial sequence
  protein pattern
  Variant (2)..(3): Xaa in position 2 to 3 is any amino acid
  Variant (4)..(4): Xaa in position 4 is any or no amino acid
  Variant (6)..(6): Xaa in position 6 is any or no amino acid
  Variant (9)..(9): Xaa in position 9 is any amino acid
  Variant (10)..(10): Xaa in position 10 is Phe or Leu
  Variant (11)..(13): Xaa in position 11 to 13 is any amino acid
  Variant (14)..(14): Xaa in position 14 is Ile, Leu or Val
  Variant (15)..(16): Xaa in position 15 to 16 is any amino acid
  Variant (17)..(17): Xaa in position 17 is Ala, Gly, Ser or Thr
  Variant (19)..(19): Xaa in position 19 is Ala, Ile, Leu or Val
  Variant (20)..(20): Xaa in position 20 is Ala, Asp, Glu, Gly or Ser
  Variant (21)..(22): Xaa in position 21 to 22 is any amino acid
  Variant (23)..(23): Xaa in position 23 is Ile, Leu, Met or Val
  Variant (24)..(33): Xaa in position 24 to 33 is any amino acid
  Variant (34)..(34): Xaa in position 34 is Ala, Gly, Ile, Leu, Pro or Val
LXXXGXGGXXXXXXXXXGXXXXXXXXXXXXXXXX
